United States Patent Application Publication US 2026/0117211 A1 - sequence listing, part 5

SEQ ID NO: 24547 - protein, 443 aa, unidentified
  REGION 1..443: note = Human gut metagenome
MMKVFVLDKDHKPLMPCGPARARKLLKAGRARVHKLQPFTIRIVDRSLADSVVQKVVVKVDPGSKETGIAVVREDEEETHHALYFINLKHRGAAIRDALTSRRQLRRGRRSRNLRYRAPRFLNRSKPKGWLPPSLQHRVDTTLSWVNRLRRLAPVSGIAQELVKFDTQLMQNPDISGVEYQQGELAGYELKEYLLEKFGRRCVYCAKSDVPLNVEHIVPKARGGSNRLSNLAIACVECNQKKGAKPIEEFLKGKPELLARVRKQLKTPLRDAASVNATRWALFHALSATGLPVRTGSGALTKYNRHCFGVPKEHWFDALCVGRINGVSYEPGMKVLNVSCTGRGQYKRTRTDKFGFPICHFMRTKRPHGVGLGDLVRMTVQKGKHPGIWTGRAFPSNDGRVVLILPEFRIWGRARNCSILSISDGYGYRLTDSETTKPTSFGK

SEQ ID NO: 24548 - protein, 453 aa, Lactobacillus sp.
MMSEKKKVDYIYVVDSNGTPLMPTSRLGMVRRWLKTGQARWFGNSRKIIQFVRPVTTNTQKLTLGVDAGFHLGLSVVGNNREYYAAESLRKSEKYRIASRKKLRRTRRNRLRYRKIRFDNRKHKDGWLVPSIQHRLDFTIKEIKRLYTFLPITNLVVEVTPFDNQKLLNPSIKSWQYQKGKMYGFKTIKDYLLARDNYRDALDGKQYPASQLRVHHLVQRKNGGSNQPDNLVLLSDINHNQANHNNGVLAKLRQNRQKTIDYRGAYFMSILAIRLSNYFDEYTTTQGYLTANLRQKYKIEKSHLNDAFVIAGGTDVTLRTNNVYSRQKLRNNNRSLQKFYDAKYIDSRDGKQKAGKELSSGRTRRSRELNYDNLRQFRKEKVKKGRVSIRRNHYQLRPYDVVLNAKTNKIERVKSVQGNGKSVKFQTGKACSIKNVISLYHVNGMLEKKIEYI

SEQ ID NO: 24549 - protein, 460 aa, unidentified
  REGION 1..460: note = Human gut metagenome
LARGTLRQRSILWNRLLPDSRKGKDFFMQPHIRAFVLDKDRKPLMPCHAARARKLLKKGKAAVFRRFPFTIILKERTREASAVQDVLVKIDPGSKSTGIAVVRKDKKDVHHALAFICLNHRGSKIRDALTSRRQLRRGRRSRNLRYRAPRFLNRTKPQGSLAPSLRHRVDTVMSWMNRLTRLVPVTGFVQELVKFDTQLMQNAAISGVEYQQGELAGYELKEYLLEKFDRKCVYCGKSGVVLNVEHIIPKARGGSNRVSNLAIACVQCNQKKGAMPIEDFLKKKPALLAQIRKQLKTTLRDAAAVNATRWSLFRSLQSTGCTVEVGSGAQTKFNRHAFSVPKEHWLDALCTGRIDGVADWEKLRPLQAYCIGRGSHKRTRTDKYGFPLCYFSRRKRPNDFGTGDYVRVKVTRGRNAGIWTGRATLTDGKLSVETKAGRVKATFLNSKCLFKSDGYKYQYL

SEQ ID NO: 24550 - protein, 432 aa, Moorena sp.
MTQNRVLVLDKNRQPLMPCHPARARELLRKGKAAVFRRHPFTIILKDREGGEVQQIRIKLDPGSKETGMALVAHFARRGPTVIWAGELTHQGAAIRKALEQRRAHRRFRRAKLRYRAPRFDNRTRREGWLPPSLQHRVDTTMTWVERLLRWAPVSALSQELVRFDTQALQNPESSGAEYQQGTLQGYEVREYLLEKWGRKCAYCGAENVSLEIDHIHPRSKGGSDRVSNLTLACRPCNQRKANRDVAEFLEKDPKRLARIEAQRKATLKDAAAVNSTRWALWRGLVAIGLPVEVGTGGRTKWNRHRQNYPKAHWIDAACVGESGGAVRLDADHRPLAIRAMGHGERQQARLNRYGFPVGHKAGAKRFLGFQTGDIVRAVIPAGKYAGTFLGRIAIRFRPSFSFVPSADGKVFDVHPKHLTLLQRSDGYVYTQ

SEQ ID NO: 24551 - protein, 427 aa, Alicyclobacillus sp.
MKQNRVLVLDTNRQPLMPCHPARARQLLKAGRASVFRRYPFTIILHDRDGGDVQPMQLKLALGSKTTGVALVAEFQRGKTVVWAAEVQHRGDQIRQALLRRRMLRRGRRYRKTRYRKPRFDNRRRPEGWLPPSLMSRVHNIETWVTRLRRWAPITHLSIQLVSFDTQKLQYPEISGAEYQQGTLYGYEVREYLLEKWGRKCAYCGAENVPLEIDHVFPRSRGGSDRVSNLVLACHRCNQAKGSQLVEEFLAHDEPRLHQIQAQLKLSLRDAAAMNATRWAVFRRLKDTGLPVEAGSGGRTKYNRFSQGYPKAKWIDAACVGESGQHVRLDTQMRVLTIVAKGHGKRQRRITDKYGFPRSHAPSSRSYMGFRTGDLVQAYIPRGKYAGTHVGRIVIRHRPSFRLNGFDVHPKYLTILQRGDGYAYAME

SEQ ID NO: 24552 - protein, 464 aa, unidentified; identical to SEQ ID NO: 24525
  REGION 1..464: note = Human gut metagenome

SEQ ID NO: 24553 - protein, 431 aa, Acidithiobacillus sp.; identical to SEQ ID NO: 24542

SEQ ID NO: 24554 - protein, 455 aa, Moorena sp.
MEIQVVFVLDKRKRPLMPCTEKRARLMLNRGRAVVHKLHPFTIRLKDRVGGDVQPIVLKINPGSKTTGLAVVREMESQRIDEIETIHAVLWTADLNHRGAAIRKAMERRAGFRRRRRSANLRYRQPRFNNRTRPQGWLAPSLQHRVDTTMAWVTRLRKVTPISGVIHQLHRFDTQALQNPEISGVEYQQGTLFGYEVREYLLEKWERQCAYCNAKDTPLQIDHIYPKSKGGSNRISNLTLACQGCNQKKGALPVEQFLAGKPQVLKRIQARAKVPLKDAASVNATRWALFRALKATGLAIAVTTGARTKFNRVRLGIPKSHALDAACGGKVDGITKWATPTLNIRCTGRGAYQRTQVNASGFPRGHLMRVKSVRGFQTGDLARAVVPKGKNAGTHTGRVAVRATGSFNIQIPSGHAVQGISHRYCTLLQRADGYGYFVQPKLIARPEQEAARLAA

SEQ ID NO: 24555 - protein, 427 aa, Acidiferrobacter sp.; identical to SEQ ID NO: 24546

SEQ ID NO: 24556 - protein, 501 aa, unidentified
  REGION 1..501: note = Human gut metagenome
MTGSYTAAPPANGASRTVDVPHRMTGNCTRSVKGKNKMPVCVLSANGERLMPTENYGKVRHLLKDGRAVIAKRNPFTIQLTYDTSTYTQPIEMCVGTGYEHIGVSIKTKAKEVVSQQYDMLTNERSRHDDCRAYRRTRRNRLRYRAARFNNRVSGKKPGWIAPSLDNKVERHLDIISRYLSVMPVTDVFIKAATYDTQLLAALEAGEPVPQGKDYQHGPQYGYDTLREAVFERDHYTCVYCKRGLKDGAILHVHHAYYWKGLHGNSMRELATCCEKCNTPANHKEGGKLWGFDKPLRKYTGEAFMNSVRWILYQRAMARFQGVAEVHMTYGVISKRVRTNLGLPYSCATDAYCMGELRPEARCETEVFQKYRRNNRVLSKFYDAKYYDTREKGVIRSGNELSSGRTNRNHNLDGENLRRFRGCKKSKGRTSTRKQRYAMQPGDIVVYGNRKYVSKGCSSYGRALSLLTDGKPLMVSMKKIQLVRHKGGWVRLPHAAAEAKK

SEQ ID NO: 24557 - protein, 464 aa, unidentified
  REGION 1..464: note = Human gut metagenome
MPVCVLSANGERLMPTENYGKVRHLLKDGRAVIAKRNPFTIQLTYDTSTYTQPIEMCVGTGYEHIGVSIKTKAKEVVSQQYDMLTNERSRHDDCRAYRRTRRNRLRYRAARFNNRVSGKKPGWIAPSLDNKVERHLDIISRYLSVMPVTDVFIKAATYDTQLLAALEAGEPVPQGKDYQHGPQYGYDTLREAVFERDHYTCVYCKRGLKDGAILHVHHAYYWKGLHGNSMRELATCCEKCNTPANHKEGGKLWGFDKPLRKYTGEAFMNSVRWILYQRAMARFQGVAEVHMTYGVISKRVRTNLGLPYSCATDAYCMGELRPEARCETEVFQKYRRNNRVLSKFYDAKYYDTREKGVIRSGNELSSGRTNRNHNLDGENLRRFRGCKKSKGRTSTRKQRYAMQPGDIVVYGNRKYVSKGCSSYGRALSLLTDGKPLMVSVKKIQLVRHKGGWVRLPQAAAGAKE

SEQ ID NO: 24558 - protein, 454 aa, Lactobacillus sp.
MPQKKVEYIYVVDSKGEPVMPTSRLGMVRRWLKSGQAIWYGNSRKTIQFVRPITTNTQELTLGVDAGFHLGLSVVSVDNQREYYASESVRDSKREKEKLEHRRDLRRGRRNRLRHRKKRFKNRKRQKKSLAPSVQHLLDFTIREIKRLYEFLPISKLVVEVAPFDNQKLANPNIKPWEYTQGRMHGFKSVKDYLLARDGYRDALDGKVYPASQLRVHHLVQRKDGGTNQPDNLVLLSDVNHNQANHVDGTLAKLAAERQTDLNTNYRGAYFMSVLAKRLPTYFANYIQTQGYITANLRTLYGIEKSHRNDAFIIAGGTDTCLRTSNIYSRTKVANNNRVLQKFYDARYIDSRDGKIKPGKKLSSGRTKRSRELDYKNQRIYRQEKVTKGRVSIRRNHYQLRPHDIVLNTKTNRIETVRSVVNRGESVVFQTGKSTKPTNVRCLHHINGLREEKM

SEQ ID NO: 24559 - protein, 443 aa, unidentified
  REGION 1..443: note = Human gut metagenome
MMKVFVLDKDHKPLMPCGPARARKLLKAGRARVHKLQPFTIRIVDRSLADSVVQKVVVKVDPGSKETGIAVVREDEEETHHALYFINLKHRGAAIRDALTSRRQLRRGRRSRNLRYRAPRFLNRSKPKGWLPPSLQHRVDTTLSWVNRLRRLAPVSGIAQELVKFDTQRMQNPEISGVEYQQGELAGYELKEYLLEKFGRRCVYCAKSGVPLNVEHIVPKARGGSNRLSNLAIACVECNQKKGARPIDEFLKGKPELLARIRKRLKTPLRDAASVNATRWALFEALRATGLPIRTGSGALTKFNRHCFGVPKEHWFDALCVGRINGVSYEPGMKVLNVSCTGRGQYKRTRTDKFGFPICHFMRTKRPHGVGLGDLVRMTVQKGKHPGIWTGRAFPSNDGRVVLILPEFRIWGRARNCSILSLSDGYGYRLTDSETTKPTSFGK

SEQ ID NO: 24560 - protein, 427 aa, Verrucomicrobium sp.
MMQNRVLVLDSRRQPLMPCHPARARALLKEGRAAVFRSFPFTIILLERASGDVQPVRVKCDPGSKTTGMALVAEFARRGPTVVWAAELTHRGEAIRSALRQRAMHRRSRRNRKTRYRAPRFDNRKRSEGWLPPSLRHRVDTVMSWVGRLRRLAPVTSISQELVRFDTQKMQNPEITGVEYQQGTLAGYEVREYLLEKWGRKCAYCEAKDVPLEIDHIHPRSRGGSDRVSNLTLACHACNQAKGNRDIREFLANRPERLAAILARAKTPLRDAAAINSTRWALCEQLKATSLPVETGSGGRTKYNRSQQGYSKAHWIDAACVGHSGSAVWLDAGMRPLLMEATGHGELQRARVDKHGFPLAHKRGGKSFRDFRTGDLVRCRKPGLPDFLGRVAIRFRPSFVVSGSDRKIEVHPKHLVVVQKADGYAYA

SEQ ID NO: 24561 - protein, 431 aa, unidentified
  REGION 1..431: note = Bacteroidales bacterium UBA3764
MYIYVQAQDGTPLMPTARAGKVRRMLRDGRAVIATHTPFTIRLTYDTTHHTQSVSLGVDAGTTHIGLSTTTDRKELFAAEIDLRTDIIDNLSTRREARRTRRSKRSIRYRAPRFLNRRTSKRAGLLAPSVQQKVHSHVKAVQDICRLLPVTSVTVEVAQFDTQLLKNPGIVGKQYQQGPQLGFWNVREYVLFRDNHECQHCHGKSKDRILNVHHLESRKTGGDSPDNLVTLCETCHKAYHRGELKLKLKRNSQSLRDAAFMSIMRWKVYNELKQALGVPVHLTYGYLTKYTRIGHTLEKSHAVDARCISGNADARPAGELFRFKQLRRHNRKVMKSNMLKGGHWKHNQAPREIKGFRRYDVVVYKNIQCFINSLRTRGYFSIKTFDGKLISNDNSYKSLGLVRHSGRSLFHKERGLKTRFPALSKDGSTLA

SEQ ID NO: 24562 - protein, 496 aa, Alicyclobacillus sp.
LTSLSQGRRAIGLRYPGHDTLECASQLQALSRAVKQAYGGEASAARMTSRDNIGEAHVTAERRDEEVTLMRQNRVLVLDTHRRPLMPCHPARARQLLKAGRASVFRRYPFTIILHDRNGGDVQPMQLKLAPGSKTTGVALVADFQRGKTVVWAAEIQHRGDQIRQALLRRRMLRRGRRYRKTRYRKPRFDNRRRLEGWLPPSLMSRVHNIETWVARLRRWAPITHLSMQLVSFDTQKLQYPEISGEEYQQGTLYGYEVREYLLEKWGRKCAYCGAENVPLEIDHVIPRSRGGSDRVSNLVLACHRCNQAKANRPVEEFLAHDQERLHRIQAQLKLSLRDAAAMNATRWAVFRRLKDTGLPVEAGSGGRTKYNRFSQGYPKAKWIDAACVGESGQCVRLDTQMQVLTIVAKGHGKRQRCITDKYGFPRSHAPSSRSYMGFRTGDLVQAHVPRGKYAGTHVGRIVIRHRPSFQLNGFNVHPKYLKVLQRGDGYGYAME

SEQ ID NO: 24563 - protein, 433 aa, Sutterella sp.
MINVFVLDKDHKPLMPCRPARARRLLKGGRARVHKLHPFTIRIVDRTLAESAVQPVLIKLDPGSRETGIAVVREDVKKMHYALFFINLRHRGASIRDALTARRQLRRGRRSRNLRYRAPRFLNRRRAEGWLPPSLRHRVDTTKSWVDRLRRLVPAIGLAQELVKFDTQKLENPEISGTEYQQGELAGYELKEYLLEKFGRRCVYCGKSGVPLNVEHIVPKARGGSNRISNLAIACVECNQKKGAKPIEDFLKGKPDLLKRIRSQLKTPLRDASAVNATRWALFNSLKATGLPVSVGSGALTKFNRHLYGVPKEHWLDALCVGETRRAVFDERMQVLEVYCAGRGQYKRTRTDRYGFPVAYFMRTKRPYGVGTGDIVRMSVRSGKHPGVWTGRAFATNDGSVVMLQPDFRVRGRAKNCTILARNDGYGYSLTNS

SEQ ID NO: 24564 - protein, 478 aa, unidentified; identical to SEQ ID NO: 24531
  REGION 1..478: note = Human gut metagenome

SEQ ID NO: 24565 - protein, 436 aa, unidentified
  REGION 1..436: note = gut metagenome
MPVCVLSANGERLMPTENYGKVRHLLKDGRAVIAKRNPFTIQLTYETSTYTQPIELCVGTGYEHIGVSIKAKAKEVVSQQYDLLTNERSRHDDCRAYRRTRRNRLRYRAARFNNRVSSKMPGWIAPSLDNKVERHLDIISRYLSVMPVTDVFIKAATYDTQLLAALEAGEPVPQGKDYQHGPQYGFDTLREAVFERDHYTCVYCKRGLKDGAILHVHHAYYWKGLHGNSMRELATCCEKCNTPANHKEGGKLWGFDKPLRKYTGEAFMNSVRWILYQRATARFQGAAEVHMTYGVISKRVRTNLGLPYSCATDAYCMGELRPEARCETEVFQKYRRNNRVLSKFYDAKYYDTREKGVVRSGNELSSGRTNRNHNLDGENLRRFRGCKKSKGRTSTRKQRYAMQPGDIVVYGNRKYASKGCSSYGRALSLLTDGKPL

SEQ ID NO: 24566 - protein, 403 aa, unidentified
  REGION 1..403: note = Marine sediment metagenome
MAAFFNYPKVFVVDKDGKPLLPTHPARARMLLKKGRASVERMLPFTIRLERVIENPTGVLKAKVTDGSKRVGIALVNEFTGEVVFRGVILLRQNVSRLITLRREYRRNRRYRKVRHRKARFFNRKQLMPPPSIRQKKEVIFRVLKDLSRIAPISGVDVALHSFDISSIVASRKLYGDEYTQSPYEGRTAREKVLNRDGRKCVLCGNETHLQRHHVVFRSWGGTDTPQNQVTLCKKCQREIHVEGKKQTFRSRMFVKFTHAQAGKTYLLGLLEKFGDVRICSGKEIKLWRERFGLEKTSANNALVLFAEKLAKIFGPEYLVLPLRKRKEKNNATKKFSERNGFKHFDVVRAERAGKKVIGCIRSFRSRRPSLILRTFSDNNYEVSLSKTVFICRPRNLVYLSAC

SEQ ID NO: 24567 - protein, 478 aa, unidentified
  REGION 1..478: note = Human gut metagenome
MTGNCTRSVKGKNKMPVCVLSANGERLMPTENYGKVRHLLKDGRAVIAKRNPFTIQLTYDTSTYTQPIEMCVGTGYEHIGVSIKTKAKEVVSQQYDMLTNERSRHDDCRAYRRTRRNRLRYRAARFNNRVSGKKPGWIAPSLDNKVERHLDIISRYLSVMPVTDVFIKAATYDTQLLAALEAGEPVPQGKDYQHGPQYGYDTLREAVFERDHYTCVYCKRGLKDGAILHVHHAYYWKGLHGNSMRELATCCEKCNTPANHKEGGKLWGFDKPLRKYTGEAFMNSVRWILYQRAMARFQGAAEVHMTYGVISKRVRTNLGLPYSCATDAYCMGELRPEARCETEVFQKYRRNNRVLSKFYDAKYYDTREKGVIRSGNELSSGRTNRNHNLDGENLRRFRGCKKSKGRTSTRKQRYAMQPGDIVVYGNRKYVSKGCSSYGKALSLLTDGKPLMVSMKKIQLVRHKGGWVRLPHAAAEAKK

SEQ ID NO: 24568 - protein, 478 aa, unidentified
  REGION 1..478: note = gut metagenome
MTGNCTRSVKGKNKMPVCVLSANGERLMPTENYGKVRHLLKDGRAVIAKRNPFTIQLTYDTSTYTQPIEMCVGTGYEHIGVSIKTKAKEVVSQQYDMLTNERSRHDDCRAYRRTRRNRLRYRAARFNNRVSGKKPGWIAPSLDNKVERHLDIISRYLSVMPVTDVFIKAATYDTQLLAALEAGEPVPQGKDYQHGPQYGYDTLREAVFERDHYTCVYCKRGLKDGAILHVHHAYYWKGLHGNSMRELATCCEKCNTPANHKEGGKLWGFDKPLRKYTGEAFMNSVRWILYQRAMARFQGVAEVHMTYGVISKRVRTNLGLPYSCATDAYCMGELRPEARCETEVFQKYRRNNRVLSKFYDAKYYDTREKGVIRSGNELSSGRTNRNHNLDGENLRRFRGCKKSKGRTSTRKQRYAMQPGDIVVYGNRKYVSKGCSSYGRALSLLTDGKPLMVSMKKIQLVRHKGGWVRLPQAAAGAKE

SEQ ID NO: 24569 - protein, 397 aa, Lactococcus sp.; identical to SEQ ID NO: 2318

SEQ ID NO: 24570 - protein, 452 aa, Moorena sp.
MSEIKKVDYIYVVDSNGTPLMPTSRLGMVRRWLKTGQARWFGNSRKTIQFVRPVTTNIQKLTLGVDAGFHLGLSVVGNQREYYAAESLRKSEKDRITSRRELRRTRRNRLRYRKARFDNRRRKDGWLAPSIQHRLDFTIKEIKRLYTFLPITNLVVEVTPFDNQKLLNPSIKSWQYQKGKMYGFKTIKDYLLARDNYRDALDGKQYPASKLRVHHLVQRKDGGSNQPDNLVLLSDVNHNQANHNNGVLAKLRQNRQKSIDYRGAYFMSILATRLSDYFDEYTTTQGYLTANLRQKYRIGKSHLNDAFIIAGGTDVTLRTSNVYSRQKLRNNNRSLQKFYDAKYIDRRDGKQKTGKELSSGRTRRSRELNYTNLRQFRKEKVKKGRVSIRRNHYQLRPHDVVLNTKTNRIERVKSVNSRGKNVILQTGKSSTVKNIVSLYHVNGMLETKVENI

SEQ ID NO: 24571 - protein, 459 aa, Acidithiobacillus sp.
MQNRVLVLDKNRQPLMPCHPARARELLREGKAAVFRRFPFTVILKHREGGDKQELTEKLDPGSKTTGMVLVALFARRGPTAIWAAELEHRGAAIRKSLEQRCGHRRHRRGNLRYREPRFDNRTRPEGWLPPSLQHRVDTTLTWVARCCRWAPVTRLSQELVKFDLQAMQNPEISGTEYQQGTLFGYEVKEYLLEKWGRTCVYCDAENMPLEVDHIHPKGNGGTDRVSNLAVACRDCNQEKSQQPLDLFLKTGKGRRRRMQANAKAFAGKDAKKIARRKIHEETRLQRIRSQAKAPLKDAAAVNSTRWALYTALQQTELPVETGSGGRTKWNRSQQRYPKAHWIDAACAGTSGATVRLNPNHRPMQIGAKGHGERQRARLDKNGFPVGHKTVTKFSWGFQTGDMVMAVVPNGKFAGTHLGRVAIRARPSFALSTAAFEKPFDVHPKYMTILHRSDGYVYN

SEQ ID NO: 24572 - protein, 435 aa, Moorena sp.
MNRVFVLGSTKKPLMPCHPARARELLRKGKAAVFRMEPFTIILSGREDGEVQDIEFKASPGGKATGIALVGLFRSGARLLFGAEIAHRGAAVRASLDSRRSLRHGRRGRKTRYRQPRPNFAKRSRRANCGGKWLPPSIKSRVDNAAVWSARLARLAPVACAHVETVRFDTQKLQNPEISGIEYQQGTLAGYEVREYLLEKFKRTCAYCGKQGIPLQIEHIQPIALGGTGRVSNLAIACRPCNEKKAAQPVAQFLADRPDVLKKIKAQAKAPLRDVAALNAARFALGNEIGASGLDTRRWSHGRTKLNRTAQGYAWGKWADAACVGESGAAVYIPANFRPLSIKATGRGTRQVVRTDKYGFPRGAAGQCKRVQGFQTGDLVRLVQPKGKYAGTHVGRLAGIRADGRFDIRADGQKITSGHQNFSLIQRGDGYEYRH

SEQ ID NO: 24573 - protein, 477 aa, unidentified
  REGION 1..477: note = Human gut metagenome
MTGSYTRLREEKKMAVCVLSANGERLMPTENYGKVRHLLKEGRAVIAKRNPFTIQLTYETSTYTQSIEMCVGTGYEHIGVSIKTKAKEVVSQQYDLLTNERSRHDDCRVHRRTRRNHLRYRAARFNNRVSIRKPGWIAPSLDNKVERHLDIISRYLSVMPVTDVFIKAATYDTQLLAALEAGEPVPQGKDYQHGPQYGHDTLREAVFERDHYTCVYCKRGLKDGAILHVHHAYYWKGLHGNSMRELATCCEKCNTPANHKEGGKLWGFDKPLRKYTGEAFMNSVRWILYQRAMAHFQGAADIHMTYGVISKRVRTDLGLPYSCATDAYCMGELRPEARCETEVFQKYRRNNRVLSKFYDAKYYDTREKGVIRSGNELSSGRTNRNHNLDGENLRRFRGCKKSKGRTSTRKQRYALQPGDVVVFGNRKYVSKGCSSYGRELKLLTDGKPLVVSTKKIQLVSHKGGWVRLPQAAAGAKE

SEQ ID NO: 24574 - protein, 426 aa, Verrucomicrobium sp.
MQNRVLVLDNQRQPLMPCHPARARMLLREGKAAVFRRFPFTIIVKERAGGDVQPVRVKCDPGSKTTGMALVAEFARRRPTVAWAAELTHRGETFRGALRQRAACRRSRRNRKTRYRAPRFDNRKRSEGWLPPSLRHRVDTTMTWIGRLRRLAPVSALSQELVRFDMQAMQNPEISGIEHQQGTLAGYEVREYLLEKWGRKCAYCGAKDVPLEIDHIHPKSRGGSDRVSNLTLACHDCNQTKGNRDVGEFLAKRPERLAAILAKAKTPLNDAAAINSTRWALYNRIKATGLPVETGSGGRTKYNRSQQRYPKAHWIDAACVGHSGSAVRLDAGMRPLLMEATGHGERQRARVDKLGFPIAHKRAGKSFRGFRTGDLVRCRKPDLPDFIGRLAIRFRPWFVVSRSDRKIEVHPKDLVVVQKGDGYAYA

SEQ ID NO: 24575 - protein, 416 aa, Lactobacillus sp.
RARWFGNSRKIIQFVRPVTTNTQNLTLGVDAGFHLGLSVVGNQREYYASESLRKSEKDRITSRRELRRTRRGHLRYRQARFDNRRRKDGWLAPSIQHRLDFTIKEIKRLYTFLPITNLVVEVTPFDNQKLANPNIKAWQYQKGKMYGFKTIKDYLLARDNYRDALDGKQYPASQLRVHHLVQRKDGGSNQPDNLVLLSDINHNQANHNNGVLAKLRQNRQKTIDYRGAYFMSILATRLSNYFDEYTTTQGYLTANLRQKYKIEKSHLNDAFVIAGGTDTTLRTNNVYSRQKLRNNNRILQLFYDAKYIDCRDGKQKAGKELSSGRTRRSQELNYDNLRQFRKEKVKKGRVSIRRGHYQLRPHDVVLNTRTNRIERVKGVNSRGKGIVFQSGKYGTVKNVISLYHVNGMLEKKMENI

SEQ ID NO: 24576 - protein, 464 aa, unidentified
  REGION 1..464: note = Human gut metagenome
MPVCVLSANGERLMPTENYGKVRHLLKDGRAVIAKRNPFTIQLTYETSTYTQPIELCVGTGYEHIGVSIKTKAKEVVSQQYDLLTNERSRHDDCRAYRRTRRNRLRYRAARFNNRVSGKKPGWIAPSLDNKVERHLDIISRYLSVMPVTDVFIKAATYDTQLLAALEAGEPVPQGKDYQHGPQYGFDTLREAVFERDHYTCVYCKRGLKDGAILHVHHAYYWKGLHGNSMRELATCCEKCNTPANHKEGGKLWGFDKPLRKYTGEAFMNSVRWILYQRATARFQGAAEVHMTYGVISKRVRTNLGLPYSCATDAYCMGELRPEARCETEVFQKYRRNNRVLSKFYDAKYYDTREKGVVRSGNELSSGRTNRNHNLDGENLRRFRGCKKSKGRTSTRKQRYAMQPGDIVVYGNRKYASKGCSSYGRALSLLTDGKPLVVSMKKIQLVRHKGGWVRLPQAAAGAKE

SEQ ID NO: 24577 - protein, 470 aa, Scytonema sp.
VLLAQNLDKHWRRKLRRKTITYLLGIQIMKVYVVNKHERPLMPTSPRKARLLLKEGKARIYRRDPFAIQLIYGSSGYTQPGNLGIDAGYSNIGYSVVNEKEELIGGEVEMLQGISKCLKERLSYRRQRRNRKRYRAPRFNNRRRKDKWLAPSIQHKLDTHHKLIKRIVEIVPVKKIVIEVASFNIQKIKDASIEGVGYQQGEQYGFDNLREYILHRDGHKCQNPNCKNKSINPILQVHHIGFWKEDRTDRPANLITLCDKCHTPKNHTKNGFLFGWQPKLKPFKGETFMSTVRWRLTNEGEYSSTYGYITKGVRRDFNIEKSHHNDAFVIAGGTTQERIEPLMLEQIRRNKRSMEQFYDAKYIDSRDGSIKSGSELSSGRRIRNKNKNGENLRVYRQRKVSKGQRRIKKSRYRYNSKDFVMFENAVYEVVGMQNLGTGVKLKDYPGVTNKVVNVKKVKPIKRRTGLCTKI

SEQ ID NO: 24578 - protein, 464 aa, unidentified
  REGION 1..464: note = Human gut metagenome
MPVCVLSANGERLMPTENYGKVRHLLKDGRAVIAKRNPFTIQLTYETSTYTQPIELCVGTGYEHIGVSIKAKAKEVVSQQYDLLTNERSRHDDCRAYRRTRRNRLRYRAARFNNRVSSKMPGWIAPSLDNKVERHLDIISRYLSVMPVKDVFIKAATYDTQLLAALEAGEPVPQGKDYQHGPQYGYDTLREAVFERDHYTCVYCKRGLKDGAILHVHHAYYWKGLHGNSMRELATCCEKCNTPANHKEGGKLWGFDKPLRKYTGEAFMNSVRWILYQRATARFQGAAEVHMTYGVISKRVRTNLGLPYSCATDAYCMGELRPEARCETEVFQKYRRNNRVLSKFYDAKYYDTREKGVVRSGNELSSGRTNRNHNLDGENLRRFRGCKKSKGRTSTRKQRYAMQPGDIVVYGNRKYASKGCSSYGRALSLLTDGKPLVVSMKKIQLVRHKGGWVRLPQAAAGAKE

SEQ ID NO: 24579 - protein, 464 aa, unidentified
  REGION 1..464: note = gut metagenome
MPVCVLSANGERLMPTENYGKVRHLLKDGRAVIAKRNPFTIQLTYETSTYTQPIELCVGTGYEHIGVSIKTKAKEVVSQQYDLLTNERSRHDDCRAYRRTRRNRLRYRAARFNNRVSGKKPGWIAPSLDNKVERHLDIISRYLSVMPVTDVFIKAATYDTQLLAALEAGEPVPQGKDYQHGPQYGFDTLREAVFERDHYTCVYCKRGLKDGAILHVHHAYYWKGLHGNSMRELATCCEKCNTPANHKEGGKLWGFDKPLRKYTGEAFMNSVRWILYQRATARFQGAAEVHMTYGVISKRVRTNLGLPYSCATDAYCMGELRPEARCETEVFQKYRRNNRVLSKFYDAKYYDTREKGVVRSGNELSSGRTNRNHNLDGENLRRFRGCKKSKGRTSTRKQRYAMQPGDIVVYGNRKYVSKGCSSYGRALSLLTDGKPLVVSMKKIQLVRHKGGWVRLPQAAAGAKE

SEQ ID NO: 24580 - protein, 427 aa, Verrucomicrobium sp.; identical to SEQ ID NO: 24560

SEQ ID NO: 24581 - protein, 464 aa, unidentified; identical to SEQ ID NO: 24525
  REGION 1..464: note = Human gut metagenome

SEQ ID NO: 24582 - protein, 452 aa, Moorena sp.; identical to SEQ ID NO: 24570

SEQ ID NO: 24583 - protein, 459 aa, unidentified
  REGION 1..459: note = Human gut metagenome
LARGTLRQSILWNRLLPDSRKGKDFFMQPHIRAFVLDKDRKPLMPCHAARARKLLKKGKAAVFRRFPFTIILKERTREASAVQDVLVKIDPGSKSTGIAVVRKDKKDVHHALAFICLNHRGSKIRDALTSRRQLRRGRRSRNLRYRAPRFLNRTKPQGSLAPSLRHRVDTVMSWMNRLTRLVPVTGFVQELVKFDTQLMQNAAISGVEYQQGELAGYELKEYLLEKFDRKCVYCGKSGVVLNVEHIIPKARGGSNRVSNLAIACVQCNQKKGAMPIEDFLKKKPALLAQIRKQLKTTLRDAAAVNATRWSLFRSLQSTGCTVEVGSGAQTKFNRHAFSVPKEHWLDALCTGRIDGVADWEKLRPLQAYCIGRGSHKRTRTDKYGFPLCYFSRRKRPNDFGTGDYVRVKVTRGRNAGIWTGRATLTDGKLSVETKAGRVKATFLNSKCLFKSDGYKYQYL

SEQ ID NO: 24584 - protein, 464 aa, unidentified; identical to SEQ ID NO: 24525
  REGION 1..464: note = Human gut metagenome

SEQ ID NO: 24585 - protein, 525 aa, unidentified
  REGION 1..525: note = Human metagenome
VLIYLFGLSFGIYSANSTSVDVPHQMTGSYTAAPPQTEHHAVDVPHRMTGNCTRSVKGKNKMPVCVLSANGERLMPTENYGKVRHLLKDGRAVIAKRNPFTIQLTYDTSTYTQPIEMCVGTGYEHIGVSIKTKAKEVVSQQYDMLTNERSRHDDCRAYRRTRRNRLRYRAARFNNRVSGKKPGWIAPSLDNKVERHLDIISRYLSVMPVTDVFIKAATYDTQLLAALEAGEPVPQGKDYQHGPQYGYDTLREAVFERDHYTCVYCKRGLKDGAILHVHHAYYWKGLHGNSMRELATCCEKCNTPANHKEGGKLWGFDKPLRKYTGEAFMNSVRWILYQRAMARFQGVAEVHMTYGVISKRVRTNLGLPYSCATDAYCMGELRPEARCETEVFQKYRRNNRVLSKFYDAKYYDTREKGVIRSGNELSSGRTNRNHNLDGENLRRFRGCKKSKGRTSTRKQRYAMQPGDIVVYGNRKYVSKGCSSYGRALSLLTDGKPLMVSMKKIQLVRHKGGWVRLPHAAAEAKK

SEQ ID NO: 24586 - protein, 478 aa, unidentified; identical to SEQ ID NO: 24531
  REGION 1..478: note = Human gut metagenome

SEQ ID NO: 24587 - protein, 464 aa, unidentified; identical to SEQ ID NO: 24525
  REGION 1..464: note = Human gut metagenome

SEQ ID NO: 24588 - protein, 478 aa, unidentified
  REGION 1..478: note = Human gut metagenome
MTGNCTRSVKGKNKMPVCVLSANGERLMPTENYGKVRHLLKDGRAVIAKRNPFTIQLTYETSTYTQPIELCVGTGYEHIGVSIKTKAKEVVSQQYDMLTNERSRHDDCRAYRRTRRNRLRYRAARFNNRVSGKKPGWIAPSLDNKVERHLDIISRYLSVMPVTDVFIKAATYDTQLLAALEAGEPVPQGKDYQHGPQYGYDTLREAVFERDHYTCVYCKRGLKDGAILHVHHAYYWKGLHGNSMRELATCCEKCNTPANHKEGGKLWGFDKPLRKYTGEAFMNSVRWILYQRAMARFQGVAEVHMTYGVISKRVRTNLGLPYSCATDAYCMGELRPEARCETEVFQKYRRNNRVLSKFYDAKYYDTREKGVIRSGNELSSGRTNRNHNLDGENLRRFRGCKKSKGRTSTRKQRYAMQPGDIVVYGNRKYVSKGCSSYGRALSLLTDGKPLMVSMKKIQLVRHKGGWVRLPHAAAEAKK

SEQ ID NO: 24589 - protein, 433 aa, unidentified
  REGION 1..433: note = metagenome
MQSHIRAFVLDKDRKPLMPCHAARARKLLKKGKAAVFRRFPFTIILKERTREVSAVQDVLVKIDPGSKSTGIAVVRKDEKNVHHALAFICLNHRGSKIRDALTSRRQLRRGRRSRNLRYRAPRFLNRKKPKGWLAPSLQHRVDAVMSWMNRLTRLVPVAGFVQELVKFDTQLMQNAAISGVEYQQGELAGYELKEYLLEKFDRKCVYCGKSGVVLNVEHIIPKARGGSNRVSNLAIACAQCNQKKGAMPIEDFLKKKPALLAQICKQLKTPLRDAAAVNATRWALYRNLQATGCTVEIGSGALTKFNRHAFSVPKEHWLDALCAGRIDGVADWENLRPLQAYCIGRGSHKRTRTDKYGFPLCYFSRYKRPNDFGTGDYVRVKVTRGRNTGIWIGRATLTDGKLSVETKAGRVKATFLNSKCLFKSDGYKYQYL

SEQ ID NO: 24590 - protein, 478 aa, unidentified; identical to SEQ ID NO: 24531
  REGION 1..478: note = Human gut metagenome

SEQ ID NO: 24591 - protein, 478 aa, unidentified
  REGION 1..478: note = Human gut metagenome
MTGNCTRSVKGKNKMPVCVLSANGERLMPTENYGKVRHLLKDGRAVIAKRNPFTIQLTYDTSTYTQPIEMCVGTGYEHIGVSIKTKAKEVVSQQYDMLTNERSRHDDCRAYRRTRRNRLRYRAARFNNRVSGKKPGWIAPSLDNKVERHLDIISRYLSVMPVTDVFIKAATYDTQLLAALEAGEPVPQGKDYQHGPQYGYDTLREAVFERDHYTCVYCKRGLKDGAILHVHHAYYWKGLHGNSMRELATCCEKCNTPANHKEGGKLWGFDKPLRKYTGEAFMNSVRWILYQRAMARFQGVAEVHMTYGVISKRVRTNLGLPYSCATDAYCMGELRPEARCETEVFQKYRRNNRVLSKFYDAKYYDTREKGVIRSGNELSSGRTNRNHNLDGENLRRFRGCKKSKGRTSTRKQRYAMQPGDIVVYGNRKYVSKGCSSYGRALSLLTDGKPLMVSMKKIQLVRHKGGWVRLPQAAAEAKE

SEQ ID NO: 24592 - protein, 448 aa, Lactobacillus sp.
MSQKKVEHIYVVDSRGEPVMPTSRLGMVRRWLKSGQAIWYGNSRNTIQFVRPITTNAQELTLGVDAGFHLGLSVVGNQREYYASESVRKSEKDKITARREYRRTRRNRLRYRKPRFDNRKRPDSWLAPSIQHRLDFTIKEIKRLYNFLPISKLVIEVSPFDNQKLLNPNIKPWEYTQGKMQGFKDVKDYLLARDVNRDALDGKIYPASQLRVHHLVQRKDGGTNQPDNLVLLSDRNHNQANHNNGVLAKLAQNRQNSIDYKGAYFMSILASRLPNYFDSYIETQGYITANLRKLYGIEKSHLNDAFVIAGGTNQYLRTSNVYSRTKVANNNRSLQKFYDAKYIDSRDGKKKSGKELSSGRTRRSREINYDNQRIYRQEKVSKGRVSIRRQHYQLRPHDIIRNLKTNKIEIVKGVINNGNSVLFQTGKSVTTKKVKCLYHINGLREEKI

SEQ ID NO: 24593 - protein, 445 aa, Microcoleus sp.
MKVYVINRHGRPLMPTTPRKARLLLNRGKAKITGREPFTIQLVYGSSGYTQPVELGIDAGYENIGFSAVNKKEEVIGGELKMLKGMSERITEKRKYRRTRRNRLRYRKPRFSNRRVDKGCLAPSIQHKLDTHHRLIDKIRRILPIIAVTIEVAAYDIQKINNPTIEGEQYQYGEKYGFDNLREYILHRDRHKCQNPNCKNKADDPILQVHHLGFWKNPPDRTDRPANLVTLCTKCHTSKNHQKKGFLFGWEPKLKSFKGETFMTMVRWRLTEEGQHKSTFGYITKGKRRELEIEKSHHNDAFVIAGGRTQSRVTKPLMLEQIRRNKRSMEQFYDAKYRDLRDGKTRSGSELSSGRRTRNINLNGENVRQHRAHKASAGRRSIKKKRYPYKQHDLVLFEGTIYEVIGMQNLGAGVKLKNYPGVKNKVVKPSVVKSIRKRGGLCEVV

SEQ ID NO: 24594 - protein, 478 aa, unidentified
  REGION 1..478: note = Human gut metagenome
MTGNCTRSVKGKNKMPVCVLSANGERLMPTENYGKVRHLLKDGRAVIAKRNPFTIQLTYDTSTYTQPIEMCVGTGYEHIGVSIKTKAKEVVSQQYAMLTNERSRHDDCRAYRRTRRNRLRYRAARFNNRVSGKKPGWIAPSLDNKVERHLDIISRYLSVMPVTDVFIKAATYDTQLLAALEAGEPVPQGKDYQHGPQYGYDTLREAVFERDHYTCVYCKRGLKDGAILHVHHAYYWKGLHGNSMRELATCCEKCNTPANHKEGGKLWGFDKPLRKYTGEAFMNSVRWILYQRAMARFQGVAEVHMTYGVISKRVRTNLGLPYSCATDAYCMGELRPEARCETEVFQKYRRNNRVLSKFYDAKYYDTREKGVIRSGNELSSGRTNRNHNLDGENLRRFRGCKKSKGRTSTRKQRYAMQPGDIVVYGNRKYVSKGCSSYGRALSLLTDGKPLMVSMKKIQLVRHKGGWVRLPHAAAEAKK

SEQ ID NO: 24595 - protein, 478 aa, unidentified; identical to SEQ ID NO: 24531
  REGION 1..478: note = Human gut metagenome

SEQ ID NO: 24596 - protein, 382 aa, unidentified
  REGION 1..382: note = Human gut metagenome
MLTNERSRHDDCRAYRRTRRNRLRYRAARFNNRVSGKKPGWIAPSLDNKVERHLDIISRYLSVMPVTDVFIKAATYDTQLLAALEAGEPVPQGKDYQHGPQYGYDTLREAVFERDHYTCVYCKRGLKDGAILHVHHAYYWKGLHGNSMRELATCCEKCNTPANHKEGGKLWGFDKPLRKYTGEAFMNSVRWILYQRAMARFQGVAEVHMTYGVISKRVRTNLGLPYSCATDAYCMGELRPEARCETEVFQKYRRNNRVLSKFYDAKYYDTREKGVIRSGNELSSGRTNRNHNLDGENLRRFRGCKKSKGRTSTRKQRYAMQPGDIVVYGNRKYVSKGCSSYGRALSLLTDGKPLMVSMKKIQLVRHKGGWVRLPHAAAEAKK

SEQ ID NO: 24597 - protein, 500 aa, unidentified; identical to SEQ ID NO: 24543
  REGION 1..500: note = Human gut metagenome

SEQ ID NO: 24598 - protein, 433 aa, unidentified
  REGION 1..433: note = Human gut metagenome
MQSHIRAFVLDKDRKPLMPCHAARARKLLKKGKAAVFRRFPFTIILKERTREVSAVQDVLVKIDPGSKSTGIAVVRKDEKNVHHALAFICLNHRGSKIRDALTSRRQLRRGRRSRNLRYRAPRFLNRKKPKGWLAPSLQHRVDAVMSWMNRLTRLVPVAGFVQELVKFDTQLMQNAAISGVEYQQGELAGYELKEYLLEKFDRKCVYCGKSGVVLNVEHIIPKARGGSNRVSNLAIACAQCNQKKGAMPIEDFLKKKPALLAQIRKQLKTPLRDATAVNATRWALYRNLQATGCTVEVGSGALTKFNRHAFSVPKEHWLDALCAGRIDGVADWENLRPLQAYCIGRGSHKRTRTDKYGFPLCYFSRYKRPNDFGTGDYVRVKVTRGRNTGIWIGRATLTDGKLSVETKAGRVKATFLNSKCLFKSDGYKYQYL

SEQ ID NO: 24599 - protein, 454 aa, Lactobacillus sp.; identical to SEQ ID NO: 24558

SEQ ID NO: 24600 - protein, 478 aa, unidentified
  REGION 1..478: note = Human gut metagenome
MTGNCTRSVKGKNKMPVCVLSANGERLMPTENYGKVRHLLKDGRAVIAKRNPFTIQLTYDTSTYTQPIEMCVGTGYEHIGVSIKTKAKEVVSQQYDMLTNERSRHDDCRAYRRTRRNRLRYRAARFNNRVSGKKPGWIAPSLDNKVERHLDIISRYLSVMPVTDVFIKAATYDTQLLAALEAGEPVPQGKDYQHGPQYGHDTLRAAVFERDHYTCVYCKRCLKDGAILHVHHAYYWKGLHGNSMRELATCCEKCNTPANHKEGGKLWGFDKPLRKYTGEAFMNSVRWILYQRAMARFQGAVEVHMTYGVISKRVRTDLGLPYSCATDAYCMGELRPEARCETEVFQKYRRNNRVLSKFYDAKYYDTREKGVIRSGNELSSGRTNRNHNLDGENLRRFRGCKKSKGRTSTRKQRYAMQPGDIVVYGNRKYVSKGCSSYGRALSLLTDGKPLMVSTKKIQLVRHKGGWVRLPQAAAGAKE

SEQ ID NO: 24601 - protein, 464 aa, unidentified
  REGION 1..464: note = Human gut metagenome
MPVCVLSANGERLMPTENYGKVRHLLKDGRAVIAKRNPFTIQLTYETSTYTQPIELCVGTGYEHIGVSIKAKAKEVVSQQYDLLTNERSRHDDCRAYRRTRRNRLRYRAARFNNRVSSKMPGWIAPSLDNKVERHLDIISRYLSVMPVKDVFIKAATYDTQLLAALEAGEPVPQGKDYQHGPQYGYDTLREAVFERDHYTCVYCKRGLKDGAILHVHHAYYWKGLHGNSMRELATCCEKCNTPANHKEGGKLWGFDKPLRKYTGEAFMNSVRWILYQRAMARFQGAAEVHMTYGVISKRVRTNLGLPYSCATDAYCMGELRPEARCETEVFQKYGRNNRVLSKFYDAKYYDTREKGVIRSGNELSSGRTNRNHNLDGENLRRFRGCKKSKGRTSTRKQRYAMQPGDIVVYGNRKYVSKGCSSYGKALSLLTDGKPLMVSMKKIQLVRHKGGWVRLPHAAAEAKK

SEQ ID NO: 24602 - protein, 478 aa, unidentified; identical to SEQ ID NO: 24531
  REGION 1..478: note = Human gut metagenome

SEQ ID NO: 24603 - protein, 453 aa, Lactobacillus sp.
MMSEIKKFNYIYVVDSNGTPLMPTSRLGMVRRWLKTGQARWFGNSRKTIQFVRPVTTNTQNLTLGVDAGFHLGLSVVGNQREYYASESLRKSEKDRITSRRELRRTRRGHLRYRQARFDNRRRKDGWLAPSIQHRLDFTIKEIKRLYTFLPITNLVVEVTPFDNQKLANPNIKAWQYQKGKMYGFKTIKDYLLARDNYRDALDGKQYPASQLRVHHLVQRKDGGSNQPDNLVLLSDINHNQANHNNGVLAKLRQNRQKTIDYRGAYFMSILATRLSNYFDEYTTTQGYLTANLRQKYKIEKSHLNDAFVIAGGTDTTLRTNNVYSRQKLRNNNRILQLFYDAKYIDCRDGKQKAGKELSSGRTRRSQELNYDNLRQFRKEKVKKGRVSIRRGHYQLRPHDVVLNTRTNRIERVKGVNSRGKGIVFQNGKYGTVKNVISLYHVNGMLEKKMENI

SEQ ID NO: 24604 - protein, 508 aa, unidentified
  REGION 1..508: note = Human gut metagenome
MVYVLDINGHPLMPTERHGKVKHLLKNGKAKVVKRCPFTIQLLYKSLTYTQSIILGVDAGSKHIGLSATTNDKEFYASDVELRTDIVKLISKRRELRRSRRNRKTRYRQARFDNRKRKDGWLAPSISQKIKCHIKVVENVHKILPITNIVVETASFDIQKIKNPNIKDTEYQQGEQLDFWNVREYVLFRDEHICQCCKGKTKDKILNVHHIESRKTGGNAPNNLITLCETCHKGYHNGTVRLPKTIKRGIIFRDAAFMGIMRWAFYNKLREKYKNVSISTDLAKKDNISLKDITLPRNKKLKMQNWLITGASGGCGKVLALRLKKLGYTVAVTSRDMSRLESMPEGIYKIESQLDSSDTCEKAIQTAIDMKSVAEPYIRGRALRHLEKGRIVIFAAGIGSPYFSTDTTAALRAAEIEADAILMAKNGVDGVYNDDPRKNADAVKFDELTHVEVIKRGLKIMDATASTLSMDNDIDLVVFNMNEPGNIKRVIFGEQIGTTVSNKAESHK

SEQ ID NO: 24605 - protein, 433 aa, unidentified
  REGION 1..433: note = Human gut metagenome
MQPHIRAFVLDKDRKPLMPCHAARARKLLKKGKAAVFRRFPFTIILKERTREASAVQDVVVKVDPGSKGTGLAVVRKDEKNVHHALAFICLSHRGSKIRDALTSRRQLRRGRRSRNLRYRAPRFLNRRKPQGWLAPSLQHRVDTVMSWMNRLTRLVPVTGFVQELVKFDTQLMQNAAISGVEYKQGELAGYELKEYLLEKFDRKCVYCGKSGVVLNVEHIIPKARGGSNRVSNLAIACAQCNQKKGAMPIEDFLKKKPALLAQIRKQLKTPLRDATAVNATRWALYRHLQATGCTVEVGSGALTKFNRHAFSVPKEHWLDALCAGRIDGVADWENLRPLQAYCIGRGSHKRTRTDKYGFPLCYFSRHKRPNDFGTGDYVRVKVTRGRNAGIWIGRATLTNGYLSVETRSFRVQATFKNSQVLFKNDGYKYQYL

SEQ ID NO: 24606 - protein, 464 aa, unidentified; identical to SEQ ID NO: 24525
  REGION 1..464: note = Human gut metagenome

SEQ ID NO: 24607 - protein, 460 aa, unidentified; identical to SEQ ID NO: 24549
  REGION 1..460: note = Human gut metagenome

SEQ ID NO: 24608 - protein, 460 aa, unidentified; identical to SEQ ID NO: 24549
  REGION 1..460: note = Human gut metagenome

SEQ ID NO: 24609 - protein, 401 aa, unidentified
  REGION 1..401: note = Human gut metagenome
MSTCACVLSKNGERLMPTIRLGKVRHLLKDGKAKIIKHHPFTIQLLYDNETNIQPIEICEDVGYNYIGISVKSQSHEYVSVQYDTLQDEKDCHDSCRKMRRIRRNRLRYRKPRFDNRKRNKGWLAPSLEHKKELNVNVIKMYCKVVPITHVTVEVGSFDTMLVKAIQEGKAIPEGADYQKGPRYNLATLREAVFYRDKYTCQVCGRKANEGAILHVHHMFYWKGRHGNSLSELLTVCEKCHTPANHQQGGKLYRFGENIKFAGNINHNVVMVGLYTAGVAHPQAGVLGVGVALRNGFTAHADGVGVLGTPGADQTQIFADGQHLVQWDGDLAGKIDRSAICGRGDSGFQLCPACDGILGGGTGCVVERDFLNGEIIGKGAYFSGNFRVGIAVGFFIFRQFA

SEQ ID NO: 24610 - protein, 460 aa, unidentified; identical to SEQ ID NO: 24549
  REGION 1..460: note = Human gut metagenome

SEQ ID NO: 24611 - protein, 464 aa, unidentified; identical to SEQ ID NO: 24525
  REGION 1..464: note = Human gut metagenome

SEQ ID NO: 24612 - protein, 433 aa, unidentified
  REGION 1..433: note = Human gut metagenome
MQTHIRAFVLDKDRKPLMPCHAARARKLLKKGKAAVFRRFPFTIILKERTREVSVVQDVLVKIDPGSKSTGIAVVRKDKKDVHHALAFICLHHRGSKIRDALTSRRQLRRGRRSRNLRYRSPRFLNRTKPKGWLAPSLQHRVDTVMSWMNRLARLVPVKGFVQELVKFDTQRMQNAAISSVEYQQGELAGYELKEYLLEKFDRKCVYCGKSGIALNVEHIVPKARGGSNRVSNLAIACVQCNQKKGAMPIEDFLKKKPELLARIRRQLKTPLRDATAVNATRWSLFRDLQATGCAVEIGSGALTKFNRHCFNVPKEHWLDALCAGRINGVSDWESLRPLQAYCIGRGSHKRTRTDKYGFPLCFFSRRKRPNDFGTGDYVRVKVTRGRNAGIWTGRATLTDGKLSVETKVGRVKATFQNDKVLFKNDGYKYQYL

SEQ ID NO: 24613 - protein, 448 aa, Microcoleus sp.
MKVYVINRKGRPLMPTTPRKARLLLKSGKAKIVRRTPFSIQLTYGSSGYTQPVNLGIDAGYENIGFSAVNENRELIGGELKMLKGISERITERRKYRRTRRNRLRHRKPRFSNRRIEKGWLAPSIQHKLDTHHRLIHKICRTLPVRTVTIEVAALDIQKIKNPTIVGEQYQYGEQYGFDNLREYILHRDGHKCQNPNCNNKTDKPILQVHHLGFWKNPPDRTDRPANLITLCTKCHTPKNHQKKGFLFGWQPKLKSFKGETFMTMVRWRLTEQGRYESTFGYITKGKRRELEIEKSHHNDAFVIAGGTTQTRVVKPLMLEQIRRNKRSLEQFYDAKYRDIRDGEIRSGGELSSGRRTRNTNLNGENLRQHRAHKVSTGRRAIKRKRYPYKQRDLVLFEGKAYEVIGMQNLGTRLSLKPDTNSKTKYKPAALSKVKPLKRRGGICEQQT

SEQ ID NO: 24614 - protein, 478 aa, unidentified
  REGION 1..478: note = Human gut metagenome
MTGNCTRSVKGKNKMPVCVLSANGERLMPTENYGKVRHLLKDGRAVIAKRNPFTIQLTYDTSTYTQPIEMCVGTGYEHIGVSIKTKAKEVVSQQYDMLTNERSRHDDCRAYRRTRRNRLRYRAARFNNRVSGKKPGWIAPSLDNKVERHLDILSRYLSVMPVTDVFIKAATYDTQLLAALEAGEPVPQGKDYQHGPQYGYDTLREAVFERDHYTCVYCKRGLKDGAILHVHHAYYWKGLHGNSMRELATCCEKCNTPANHKEGGKLWGFDKPLRKYTGEAFMNSVRWILYQRAMARFQGVAEVHMTYGVISKRVRTNLGLPYSCATDAYCMGELRPEARCETEVFQKYRRNNRVLSKFYDAKYYDTREKGVIRSGNELSSGRTNRNHNLDGENLRRFRGCKKSKGRTSTRKQRYAMQPGDIVVYGNRKYVSKGCSSYGRALSLLTDGKPLMVSMKKIQLVRHKGGWVRLPHAAAEAKK

SEQ ID NO: 24615 - protein, 464 aa, unidentified; identical to SEQ ID NO: 24525
  REGION 1..464: note = Human gut metagenome

SEQ ID NO: 24616 - protein, 443 aa, Scytonema sp.; identical to SEQ ID NO: 24526

SEQ ID NO: 24617 - protein, 443 aa, unidentified
  REGION 1..443: note = Human gut metagenome
MMKVFVLDKDHKPLMPCGPARARKLLKAGRARVHKLQPFTIRIVDRSLADSVVQKVVVKVDPGSKETGIAVVREDEEETHHALYFINLKHRGAAIRDALTSRRQLRRGRRSRNLRYRAPRFLNRSKPKGWLPPSLQHRVDTTLSWVNRLRRLAPVSGIAQELVKFDTQLMQNPDISGVEYQQGELAGYELKEYLLEKFGRRCVYCAKSDVPLNVEHIVPKARGGSNRLSNLAIACVECNQKKGAKPIEEFLKGKPELLARVRKQLKTPLRDAASVNATRWALFHALSATGLPVRTGSGALTKYNRHCFGVPKEHWFDALCVGRINGVSYDSCMKVLNVSCTGRGQYKRTRTDKFGFPICHFMRTKRPHGVGLGDLVRMTVQKGKHPGIWTGRAFPSNDGRVVLILPEFRIWGRARNCSILSLSDGYGYRLTDSETTKPTSFGK

SEQ ID NO: 24618 - protein, 478 aa, unidentified
  REGION 1..478: note = Human gut metagenome
MTGNCTRSVKGKNKMPVCVLSANGERLMPTENYGKVRHLLKDGRAVIAKRNPFTIHLTYDTSTYTQPIEMCVGTGYEHIGVSIKTKAKEVVSQQYDMLTNERSRHDDCRAYRRTRRNRLRYRAARFNNRVSGKKPGWIAPSLDNKVERHLDIISRYLSVMPVTDVFIKAATYDTQLLAALEAGEPVPQGKDYQHGPQYGYDTLREAVFERDHYTCVYCKRGLKDGAILHVHHAYYWKGLHGNSMRELATCCEKCNTPANHKEGGKLWGFDKPLRKYTGEAFMNSVRWILYQRAMARFQGVAEVHMTYGVISKRVRTNLGLPYSCATDAYCMGELRPEARCETEVFQKYRRNNRVLSKFYDAKYYDTREKGVIRSGNELSSGRTNRNHNLDGENLRRFRGCKKSKGRTSTRKQRYAMQPGDIVVYGNRKYVSKGCSSYGRALSLLTDGKPLMVSMKKIQLVRHKGGWVRLPHAAAEAKK

SEQ ID NO: 24619 - protein, 427 aa, Alicyclobacillus sp.; identical to SEQ ID NO: 24551

SEQ ID NO: 24620 - protein, 433 aa, unidentified
  REGION 1..433: note = Human gut metagenome
MQSHIRAFVLDKDRKPLMPCHAARARKLLKKGKAAVFRRFPFTIILKERTREVSAVQDVLVKIDPGSKSTGIAVVRKDEKNVHHALAFICLNHRGSKIRDALTSRRQLRRGRRSRNLRYRAPRFLNRKKPKGWLAPSLQHRVDAVMSWMNRLTRLVPVAGFVQELVKFDTQLMQNAAISGVEYQQGELAGYELKEYLLEKFDRKCVYCGKSGVVLNVEHIIPKARGGSNRVSNLAIACAQCNQKKGAMPIEDFLKKKPALLAQIRKQLKTPLRDAAAVNATRWALYRNLQATGCTVEIGSGALTKFNRHAFSVPKEHWLDALCAGRIDGVADWENLRPLQAYCIGRGSHKRTRTDKYGFPLCYFSRYKRPNDFGTGDYVRVKVTRGRNTGIWIGRATLTDGKLSVETKAGRVKATFLNSKCLFKSDGYKYQYL

SEQ ID NO: 24621 - protein, 478 aa, unidentified; identical to SEQ ID NO: 24568
  REGION 1..478: note = Human gut metagenome

SEQ ID NO: 24622 - protein, 430 aa, unidentified; identical to SEQ ID NO: 2314
  REGION 1..430: note = Candidate division MSBL1 archaeon

SEQ ID NO: 24623 - protein, 433 aa, unidentified; identical to SEQ ID NO: 24598
  REGION 1..433: note = Human gut metagenome

SEQ ID NO: 24624 - protein, 423 aa, Moorena sp.
MSKKVYVQNKNGKPLMPCKPVKARHLLRDGKAEVVQRTPFTIRLKWDCEENTQKVRVGLDTGSKKAGISAVRKDGEVLYQSEVQLRTDIRSKMDRRRRYRRSRRSRKTRHREPKFDNRRRKEGWLPPSLKSKAESMVKAVKKVSEILPVEGVNVEIAPFDMHKVKDPDIEGDEYQNGELKGHTSVRQYVLYRDKDQCINCKKDDVPLQTHHIQPRSEGGTDKPSNMVSLCVECHEELHSGEIELSKRSLKYWRNKEYRFASHVNSMKDHIVDELRKLFDDVKVTFGNMTKAARKKLGLEKSDVNDSIAVALQDFIDKVSVSKLGYTFIKKCLPKGRYRLHKGERSEVSISADNSDYFGFNRWDKVELPNGTVGFVKGRRKSGYFDISDIHGNSYDHSIKHSKLRLIFKADTIITEVKGNSSLQ

SEQ ID NO: 24625 - protein, 460 aa, unidentified
  REGION 1..460: note = Human gut metagenome
LARGTLRQRSILWNRLLPDSRKGKDFFMQPHIRAFVLDKDRKPLMPCHAARARKLLKKGKAAVFRRFPFTIILKERTREASAVQDVLVKIDPGSKSTGIAVVRKDKKDVHHALAFICLNHRGSKIRDALTSRRQLRRGRRSRNLRYRAPRFLNRTKPQGSLAPSLRHRVDTVMSWMNRLTRLVPVTGFVQELVKFDTQLMQNAAISGVEYQQGELAGYELKEYLLEKFDRKCVYCGKSGVVLNVEHIIPKARGGSNRVSNIAIACVQCNQKKGAMPIEDFLKKKPALLAQIRKQLKTTLRDAAAVNATRWSLFRSLQSTGCTVEVGSGAQTKFNRHAFSVPKEHWLDALCTGRIDGVADWEKLRPLQAYCIGRGSHKRTRTDKYGFPLCYFSRRKRPNDFGTGDYVRVKVTRGRNAGIWTGRATLTDGKLSVETKAGRVKATFLNSKCLFKSDGYKYQYL

SEQ ID NO: 24626 - protein, 470 aa, unidentified
  REGION 1..470: note = Human gut metagenome
VKGKNKMPVCVLSANGERLMPTENYGKVRHLLKDGRAVIAKRNPFTIQLTYDTSTYTQPIELCVGTGYEHIGVSIKTKAKEVVSQQYDLLTNERSRHDDCRAYRRTRRNHLRYRAARFNNRVSGKKPGWIAPSLDNKVERHLDIISRYLSVMPVTDVFIKAATYDTQLLAALEAGEPVPQGKDYQHGPQYGYDTLREAVFERDHYTCVYCKRGLKDGAILHVHHAYYWKGLHGNSMRELATCCEKCNTPANHKEGGKLWGFDKPLRKYTGEAFMNSVRWILYQRAMARFQGAAEVHMTYGVISKRVRTNLGLPYSCATDAYCMGELRPEARCETEVFQKYRRNNRVLSKFYDAKYYDTREKGVIRSGNELSSGRTNRNHNLDGENLRRFRGCKKSKGRTSTRKQRYAMQPGDIVVYGNRKYVSKGCSSYGRALSLLTDGKPLMVSMKKIQLVRHKGGWVRLPHAAAEAKK

SEQ ID NO: 24627 - protein, 443 aa, unidentified; identical to SEQ ID NO: 24617
  REGION 1..443: note = Human gut metagenome

SEQ ID NO: 24628 - protein, 478 aa, unidentified; identical to SEQ ID NO: 24531
  REGION 1..478: note = metagenome

SEQ ID NO: 24629 - protein, 402 aa, unidentified
  REGION 1..402: note = Human gut metagenome
MSISASALRQRQKRSYRSNMICSRTSALAMTTAERTAGRAETACGIGLHGSITVYQAKSPVGLLRLWTTRWSGTWILSPVICLSCLSRMSLSRPRHTIHSSLRRWRQGNLSRRARTISMDRSTATIRCGKRSLNGTTIPVCCKRGLKDGAILHVHHAYYWKGLHGNSMRELATCCEKCNTPANHKEGGKLWGFDKPLRKYTGEAFMNSVRWILYQRAMARFQGVAEVHMTYGVISKRVRTNLGLPYSCATDAYCMGELRPEARCETEVFQKYRRNNRVLSKFYDAKYYDTREKGVIRSGNELSPGRTNRNHNLDGENLRRFRGCKKSKGRTSTRKQRYAMQPGDIVVYGNRKYVSKGCSSYGRALSLLTDGKPLMVSMKKIQLVRHKGGWVRLPHAAAEAKK

SEQ ID NO: 24630 - protein, 464 aa, unidentified; identical to SEQ ID NO: 24525
  REGION 1..464: note = Human gut metagenome

SEQ ID NO: 24631 - protein, 416 aa, Moorena sp.; identical to SEQ ID NO: 24575

SEQ ID NO: 24632 - protein, 478 aa, unidentified
  REGION 1..478: note = Human gut metagenome
MTGNCTRSVKGKNKMPVCVLSANGERLMPTENYGKVRHLLKDGRAVIAKRNPFTIQLTYDTSTYTQPIEMCVGTGYEHIGVSIKTKAKEVVSQQYDMLTNERSRHDDCRAYRRTRRNRLRYRAARFNNRVSSKMPGWIAPSLDNKVERHLDIISRYLSVMPVKDVFIKAATYDTQLLAALEAGEPVPQGKDYQHGPQYGYDTLREAVFERDHYTCVYCKRGLKDGAILHVHHAYYWKGLHGNSMRELATCCEKCNTPANHKEGGKLWGFDKPLRKYTGEAFMNSVRWILYQRAMARFQGVAEVHMTYGVISKRVRTNLGLPYSCATDAYCMGELRPEARCETEVFQKYRRNNRVLSKFYDAKYYDTREKGVIRSGNELSSGRTNRNHNLDGENLRRFRGCKKSKGRTSTRKQRYAMQPGDIVVYGNRKYVSKGCSSYGRALSLLTDGKPLMVSMKKIQLVRHKGGWVRLPHAAAEAKK

SEQ ID NO: 24633 - protein, 455 aa, unidentified
  REGION 1..455: note = Human gut metagenome
MMPTQKQVNYVYVVDANGTPVMPTSRLGMVRRWLKLGQAVWYGNSRTTIQFVRPINTQTQPLTLGVNAGFHLGMAVVGNDREYYASENIRKSEKDRITARREYRRTRRNRLRYRKPRFNNRRRKAGWLAPSVQHRLEFTVREIQRIYKFLPISQLIVEVSPFDNQKLANHDIKPWEYTQGKMHGYQTVKDYLLARDHNRDALDGQFYPASQLRVHHLVQRKDGGTNQPDNLVLLSDVHHNQANHVNGTLAKLAANRQRTIDYRGAYFMSVLASRLNRYFPDYVQTQGYLTANLRTYYGIAKSHLNDAFVIAGGTDQYTRTGNVYRREKLRCNNRRLQKFYDAKYIDRRDGKQKAGKELSSGRTKRSRELNYDNQRIYRLRKVSKGRISIRRQHYRLRPHDIVFNTKIKQIEFVKGVNGNGKNVLLQSGHNVTPRKLICLYHVNGILTAKVPLVLE

SEQ ID NO: 24634 - protein, 478 aa, unidentified
  REGION 1..478: note = Human gut metagenome
MTGNCTRSVKGKNKMPVCVLSANGERLMPTENYGKVRHLLKDGRAVIAKRNPFTIQLTYDTSTYTQPIEMCVGTGYEHIGVSIKTKAKEVVSQQYDMLTNERSRHDDCRAYRRTRRNRLRYRAARFNNRVSGKKPGWIAPSLDNKVERHLDIISRYLSVMPVTDVFIKAATYDTQLLAALEAGEPVPQGKDYQHGPQYGYDTLREAVFERDHYTCVYCKRGLKDGAILHVHHAYYWKGLHGNSMRELVTCCEKCNTPANHKEGGKLWGFDKPLRKYTGEAFMNSVRWILYQRAMARFQGVAEVHMTYGVISKRVRTNLGLPYSCATDAYCMGELRPEARCETEVFQKYRRNNRVLSKFYDAKYYDTREKGVIRSGNELSSGRTNRNHNLDGENLRRFRGCKKSKGRTSTRKQRYAMQPGDIVVYGNRKYVSKGCSSYGRALSLLTDGKPLMVSMKKIQLVRHKGGWVRLPHAAAEAKK

SEQ ID NO: 24635 - protein, 427 aa, Alicyclobacillus sp.
MKQNRVLVLDTNRRPLMPCHPARARQLLKAGRASVFRRYPFTIILHDRDGGDVQPMRLKLAPGSKTTGVALVADFQRGKTVVWAAEIQHRGDQIRQALLRRRMLRRGRRYRKTRYRKPRFDNRRRPEGWLPPSLMSRVHNIETWVARLRRWAPITDLSMQLVSFDTQKLQYPEISGVEYQHGTLYGYEVREYLLEKWGRKCAYCGAENVPLEIDHVIPRSRGGSDRVSNLVLTCHRCNQAKGNRSVEEFLAHDQERLHRIQAQLKLSLRDAAAMNATRWAVYRRLKATGLPVETGSGGRTKYNRFSQGYPKAKWIDAACVGESGQYVGLDTQIQVLMIVTRGHGKRQRCITDKYGFPRSHAPSSRSYMGFRTGDLVRAIIPRGKYTGTHVGRIVIRHRPSFRLNGFDVHPKYLTILQRCDGYGYAME

SEQ ID NO: 24636 - protein, 478 aa, unidentified
  REGION 1..478: note = Human gut metagenome
MTGNCTRSVKGKNKMPVCVLSANGERLMPTENYGKVRHLLKDGRAVIAKRNPFTIQLTYDTSTYTQPIEMCIGTGYEHIGVSIKTKAKEVVSQQYDMLTNERSRHDDCRAYRRTRRNRLRYRAARFNNRVSGKKPGWIAPSLDNKVERHLDIISRYLSVMPVTDVFIKAATYDTQLLAALEAGEPVPQGKDYQHGPQYGYDTLREAVFERDHYTCVYCKRGLKDGAILHVHHAYYWKGLHGNSMRELATCCEKCNTPANHKEGGKLWGFDKPLRKYTGEAFMNSVRWILYQRAMARFQGVAEVHMTYGVISKRVRTNLGLPYSCATDAYCMGELRPEARCETEVFQKYRRNNRVLSKFYDAKYYDTREKGVIRSGNELSSGRTNRNHNLDGENLRRFRGCKKSKGRTSTRKQRYAMQPGDIVVYGNRKYVSKGCSSYGRALSLLTDGKPLMVSMKKIQLVRHKGGWVRLPHAAAEAKK

SEQ ID NO: 24637 - protein, 545 aa, unidentified
  REGION 1..545: note = Acidobacteria sp.
LILRIDRDTSSRLNQRQGTAAVASIHETHAGVARMTPHGQLRPLHPAADDGTGNRSRRTTAAGPDPGPVRSITRGEAEDPATGPGSTGPAARKRQHPPARANRVFVVGSDGRPLMPCTVRRARRLIDAGRVRRRDYRPFTIHLKDRCATDGRTAVQPVEVRCAPGRRRTGIAVVATLDEEDRVLYQEEIEHRTDITRKLVERKTHRRRRRGTKWFRKQRFDNRRRPAGWLPPSIQSVVANQEHRIERLAGRSGANTITIQTAKFDTHRILYPKVEGTGYQRGPLYRRHLREYIAAQWQHRCAYCGKGDWEDATRFNLDHVEPRTAGGPDNVRNLVWSCQPCNERKGERPVHEFLRENPERLARVLRQHPVPLAAAGQHAAICQTLVRKVQNTGREVLETTGADTSHVRSEAGIDKSHPNDAACCGSNNAIRNVGAPAKLKAIGHGRRKQIKSLPIGPYLAWRHEKPTVRRATPCPGHARRPNHVHGIRSGDLVEIRTRNGLKKGSAQVEASTRRVYVRTADGKASTSKATHIRKIAPRNGYRKSD

SEQ ID NO: 24638 - protein, 478 aa, unidentified; identical to SEQ ID NO: 24531
  REGION 1..478: note = Human gut metagenome

SEQ ID NO: 24639 - protein, 443 aa, unidentified
  REGION 1..443: note = Human gut metagenome
MMKVFVLDKDHKPLMPCGPARARKLLKAGRARVHKLQPFTIRIVDRSLADSVVQKVVVKVDPGSKETGIAVVREDEEETHHALYFINLKHRGAAIRDALTSRRQLRRGRRSRNLRYRAPRFLNRSKPKGWLPPSLQHRVDTTLSWVNRLRRLAPVSGIAQELVKFDTQRMQNPEISGVEYQQGELAGYELKEYLLEKFGRRCVYCAKSGVPLNVEHIVPKARGGSNRLSNLAIACVECNQKKGARPIEEFLKGKPELLARIRKRLKTPLRDAASVNATRWALFEALRATGLPIRTGSGALTKFNRHCFGVPKEHWFDALCVGRINGVSYEPGMKVLNVSCTGRGQYKRTRTDKFGFPICHFMRTKRPHGVGLGDLVRMTVQKGKHPGIWTGRAFPSNDGSVVLILPEFRIKGRARNCSILSLSDGYGYRLTDSETTKPTSFGK

SEQ ID NO: 24640 - protein, 464 aa, unidentified; identical to SEQ ID NO: 24576
  REGION 1..464: note = Human gut metagenome

SEQ ID NO: 24641 - protein, 454 aa, Lactobacillus sp.; identical to SEQ ID NO: 24536

SEQ ID NO: 24642 - protein, 443 aa, Scytonema sp.
MKVYVVNKYGKPLMPTSPRKARLLLKEGKAKISSRDPFTIQLIYGSSGYTQPGALGIDAGYENIGYSVVNEKEELIGGEVRMLKGMSERLTERTKYRCQRRNRKRYRAPRFDNRRCQENWLAPSIKHKLDTHQKILDKIQKIVPVKEVAVEVASFDIQKIKNAEISGVGYQKGEQYGFDNLREYILHRDQHKCQNPNCKNKDTNPILEVHHLGFWKEDRTDRPANLITLCDKCHTPKNHKKSGFLFGWEPKLKSFKGETFMTTVRWRLTNNGEHSSTYGYITKGIRREFKIEKSHHNDAFVIAGGTTQKRVESLILEQIRRNKRSMEQFYDAKYIDARDGSTKSGSELSSGRRTRNKQKNGENLRAYRQRKISKGQRRIKKSRYRYQPKDLVQFEGKVYEVVGMQNLGTGVKLKNYPGIKNKVVNVNKVYSIKRRSGLCQIVP

SEQ ID NO: 24643 - protein, 433 aa, unidentified; identical to SEQ ID NO: 24563
  REGION 1..433: note = Human gut metagenome

SEQ ID NO: 24644 - protein, 478 aa, unidentified; identical to SEQ ID NO: 24531
  REGION 1..478: note = Human gut metagenome

SEQ ID NO: 24645 - protein, 416 aa, Lactobacillus sp.; identical to SEQ ID NO: 24575

SEQ ID NO: 24646 - protein, 464 aa, unidentified; identical to SEQ ID NO: 24525
  REGION 1..464: note = Human gut metagenome

SEQ ID NO: 24647 - protein, 427 aa, Alicyclobacillus sp.; identical to SEQ ID NO: 24635

SEQ ID NO: 24648 - protein, 433 aa, unidentified
  REGION 1..433: note = Human gut metagenome
MINVFVLDKDHKPLMPCRPARARRLLKGGRARVHKLHPFTIRIVDRTLAKSAVQPVLIKLDPGSRETGIAVVREDVKKMHYALFFINLRHRGASIRDALTARRQLRRGRRSRNLRYRAPRFLNRRRAEGWLPPSLRHRVDTTKSWVDRLRRLVPAIGLAQELVKFDTQKLENPEISGTEYQQGELAGYELKEYLLEKFGRRCVYCGKSGVPLNVEHIVPKARGGSNRISNLAIACVECNQKKGAKPIEDFLKGKPDLLKRIRSQLKTPLRDASAVNATRWALFNSLKATGLPVSVGSGALTKFNRHLYGVPKEHWLDALCVGETRRAVFDERMQVLEVYCAGRGQYKRTRTDRYGFPVAYFMRTKRPYGVGTGDIVRMSVRSGKHPGVWTGRAFATNDGSVVMLQPDFRVRGRAKNCTILARNDGYGYSLTNS

SEQ ID NO: 24649 - protein, 360 aa, Lactobacillus sp.
KDRITSRRELRRTRRNRLRYRKARFDNRRRKDGWLAPSIQHRLDFTIKEIKRLYTFLPITNLVVEVTPFDNQKLLNPSIKSWQYQKGKMYGFKTIKDYLLARDNYRDALDGKQYPASKLRVHHLVQRKDGGSNQPDNLVLLSDVNHNQANHNNGVLAKLRQNRQKSIDYRGAYFMSILATRLSDYFDEYTTTQGYLTANLRQKYRIGKSHLNDAFIIAGGTDVTLRTSNVYSRQKLRNNNRSLQKFYDAKYIDRRDGKQKTGKELSSGRTRRSRELNYTNLRQFRKEKVKKGRVSIRRNHYQLRPHDVVLNTKTNRIERVKSVNSRGKNVILQTGKSSTVKNIVSLYHVNGMLETKVENI

SEQ ID NO: 24650 - protein, 478 aa, unidentified
  REGION 1..478: note = Human gut metagenome
MTGNCTRSVKGKNKMPVCVLSANGERLMPTENYGKVRHLLKDGRAVIAKRNPFTIQLTYDTSTYTQPIEMCVGTGYEHIGVSIKTKAKEVVSQQYDMLTNERSRHDDCRAYRRTRRNRLRYRAARFNNRVSGKKPGWIAPSLDNKVERHLDIISRYLSVMPVTDVFIKAATYDTQLLAALEAGEPVPQGKDYQHGPQYGYDTLREAVFERDHYTCVYCKRGLKDGAILHVHHAYYWKGLHGNSMRELATCCEKCNTPANHKEGGKLWGFDKPLRKYTGEAFMNSVRWILYQRAMARFQGVAEVHMTYGVISKRVRTNLGLPYSCATDAYCMGELRPEARCETEVFQKYRRNNRVLSKFYDAKYYDTREKGVIRSGNELSSGRTNRNHNLDGENLRRCRGCKKSKGRTSTRKQRYAMQPGDIVVYGNRKYVSKGCSSYGRALSLLTDGKPLMVSMKKIQLVRHKGGWVRLPHAAAEAKK

SEQ ID NO: 24651 - protein, 323 aa, unidentified
  REGION 1..323: note = Human gut metagenome
LVQCWYVTLARGTLRQRSILWNRLLPDSRKGKDFFMQPHIRAFVLDKDRKPLMPCHAARARKLLKKGKAAVFRRFPFTIILKERTREASAVQDVLVKIDPGSKSTGIAVVRKDKKDVHHALAFICLNHRGSKIRDALTSRRQLRRGRRSRNLRYRAPRFLNRTKPQGSLAPSLRHRVDTVMSWMNRLTRLVPVTGFVQELVKFDTQLMQNAAISGVEYQQGELAGYELKEYLLEKFDRKCVYCGKSGVVLNVEHIIPKARGGSNRVSNLAIACVQCNQKKGAMPIEDFLKKKPALLAQIRKQLKTTLRDAGAVNAARWALRRE

SEQ ID NO: 24652 - protein, 464 aa, unidentified; identical to SEQ ID NO: 24576
  REGION 1..464: note = Human gut metagenome

SEQ ID NO: 24653 - protein, 478 aa, unidentified
  REGION 1..478: note = Human gut metagenome
MTGNCTRSVKGKNKMPVCVLSANGERLMPTENYGKVRHLLKDGRAVIAKRNPFTIQLTYDTSTYTQPIEMCVGTGYEHIGVSIKTKAKEVVSQQYDMLTNERSRHDDCRAYRRTRRNRLRYRAARFNNRVSGKKPGWIAPSLDNKVERHLDIISRYLSVMPVTDVFIKAATYDTQLLAALEAGEPVPQGKDYQHGPQYGYDTLREAVFERDHYTCVYCKRGLKDGAILHVHHAYYWKGLHGNSMRELATCCEKCNTPANHKEGGKLWGFDKPLRKYTGEAFMNSVRWILYQRAMARFQGVAEVHMTYGVISKRVRTNLGLPYSCATDAYCMGELRPEARCETEVFQKYRRNNRVLSKFYDAKYYDTREKGVIRSGNELSSGRTNRNHNLDGENLRRFRGCKKSKGRTSTRKQRYAMQPGDIVVYGNRKYVSKGCSSYGRALSLLTDGKPLMVSVKKIQLVRHKGGWVRLPQAAAGAKE

SEQ ID NO: 24654 - protein, 522 aa, unidentified
  REGION 1..522: note = Human gut metagenome
MTGSYTAAPPQTEHHAVDVPHQMTGSYTVKRRKRFPTVVDIPHRMTGNCTRSVKGKNKMPVCVLSANGERLMPTENYGKVRHLLKDGRAVIAKRNPFTIQLTYDTSTYTQPIEMCVGTGYEHIGVSIKTKAKEVVSQQYDLLTNERSRHDDCRAYRRTRRNHLRYRAARFNNRVSSKKPGWIAPSLDNKVERHLDIISRYLSVMPVTDVFIKAATYDTQLLAALEAGEPVPQGKDYQHGPQYGYDTLREAVFERDHYTCVYCKRGLKDGAILHVHHAYYWKGLHGNSMRELATCCEKCNTPANHKEGGKLWGFDKPLRKYTGEAFMNSVRWILYQRAMARFQGVAEVHMTYGVISKRVRTNLGLPYSCATDAYCMGELRPEARCETEVFQKYRRNNRVLSKFYDAKYYDTREKGVIRSGNELSSGRTNRNHNLDGENLRRFRGCKKSKGRTSTRKQRYAMQPGDIVVYGNRKYVSKGCSSYGKALSLLTDGKPLMVSMKKIQLVRHKGGWVRLPHAAAEAKK

SEQ ID NO: 24655 - protein, 453 aa, Lactobacillus sp.; identical to SEQ ID NO: 24539

SEQ ID NO: 24656 - protein, 433 aa, unidentified; identical to SEQ ID NO: 24537
  REGION 1..433: note = Human gut metagenome

SEQ ID NO: 24657 - protein, 478 aa, unidentified
  REGION 1..478: note = Human gut metagenome
MTGNCTRSVKGKNKMPVCVLSANGERLMPTENYGKVRHLLKDGRAVIAKRNPFTIQLTYDTSTYTQPIEMCVGTGYEHIGVSIKTKAKEVVSQQYDMLTNERSRHDDCRAYRRTRRNRLRYRAARFNNRVSGKKPGWIAPSLDNKVERHLDIISRYLSVMPVTDVFIKAATYDTQLLAALEAGEPVPQGKDYQHGPQYGYDTLREAVFERDHYTCVYCKRGLKDGAILHVHHAYYWKGLHGNSIRELATCCEKCNTPANHKEGGKLWGFDKPLRKYTGEAFMNSVRWILYQRAMARFQGVAEVHMTYGVISKRVRTNLGLPYSCATDAYCMGELRPEARCETEVFQKYRRNNRVLSKFYDAKYYDTREKGVIRSGNELSSGRTNRNHNLDGENLRRFRGCKKSKGRTSTRKQRYAMQPGDIVVYGNRKYVSKGCSSYGRALSLLTDGKPLMVSMKKIQLVRHKGGWVRLPHAAAEAKK

SEQ ID NO: 24658 - protein, 443 aa, unidentified
  REGION 1..443: note = Human gut metagenome
LVQCWYVTLARGTLRQRSILWNRLLPDSRKGKDFFMQPHIRAFVLDKDRKPLMPCHAARARKLLKKGKAAVFRRFPFTIILKERTREASAVQDVVVKVDPGSKSTGLAVVRKDEKNVHHALAFICLDHRGSKIRDALTSKRQLRRGRRSRNLRYRAPRFLNRTKPQGSLAPSLRHRVDTVMSWMNRLTRLVPVTGFVQELVKFDTQLMQNAAISGVEYQQGELAGYELKEYLLEKFDRKCVYCGKSGVVLNVEHIIPKARGGSNRVSNLAIACVQCNQKKGAMPIEDFLKKKPALLAQIRKQLKTTLRDAAAVNATRWSLFRSLQSTGCTVEVGSGAQTKFNRHAFSVPKEHWLDALCTGRIDGVADWEKLRPLQAYCIGRGSHKRTRTDKYGFPLCYFSRHKRPNDFGTGDYVRVKVTRGRNAGIWTGRATLTDGKLSVETK

SEQ ID NO: 24659 - protein, 478 aa, unidentified
  REGION 1..478: note = Human gut metagenome
MTGNCTRSVKGKNKMPVCVLSANGERLMPTENYGKVRHLLKDGRAVIAKRNPFTIQLTYDTSTYTQPIEMCVGTGYEHIGVSIKTKAKEVVSQQYDMLTNERSRHDDCRAYRRTRRNRLRYRAARFNNRVSGKKPGWIAPSLDNKVERHLDIISRYLSVMPVTDVFIKAATYDTQLLAALEAGEPVPQGKDYQHGPQYGYDTLREAVFERDHYTCVYCKRGLKDGAILHVHHAYYWKGLHGNSMRELATCCEKCNTPANHKEGGKLWGFDKPLRKYTGEAFMNSVRWILYQRAMARFQGVAEVHMTYGVISKRVRTNLGLPYSCATDAYCMGELRPEARCEIEVFQKYRRNNRVLSKFYDAKYYDTREKGVIRSGNELSSGRTNRNHNLDGENLRRFRGCKKSKGRTSTRKQRYAMQPGDIVVYGNRKYVSKGCSSYGRALSLLTDGKPLMVSMKKIQLVRHKGGWVRLPHAAAEAKK

SEQ ID NO: 24660 - protein, 748 aa, unidentified
  REGION 1..748: note = Human gut metagenome
MNETAINNAIRELEEMTNLLRKILERKITQKQAADKLGITPQAFQTELKNSFSNYIKKRNIITEDLLLKCLEEIETPCERIAKDIFGIAEYEKLVIIDTENQELFLQRMKDILSEREMSIMSLRYGINTDEPMTLRKIGEQFGVEQQRIRQILDKCLHKLRNPANSRLLLPNYQRYAKALQSCQEVQAVSDNLEKAYERTVEKYTWLLHKKELVDKAPEIRRQLENMIQISDMVIPENWKEILKSKGIITVFDYIEADHAELEKTKEFCPDFSCSVLDTMFGIPTQEVNSIAASAIQISTLNLSTRTFNALYRAGIRTLGDLTKKSREEIMELRNFGRSCYEELETILSKYNISLMEEIGLRDSMSKRKLLESRASSRRGRRYRKTRYRHPKWKPKTKRTYNEKADRKGRHWKKQKNTFTSKRQAGWLPPSLQSKTDHHIQWIRKLLDLLPEGYRLSIELGRFDPARMKDPEIHGELYQKGPQYDYENVRAYVLARDGYTCRVCKKKGGKLHVHHILYRSRGASDNPKYMAAVCSKCHTTENHLPGGILYQWMQDQKKFTRGLRDATFMNILKKRLRKAFPDAVFTYGNITKADREKLELPKSHGNDATAIALVKTEVKSVKDEEPVIHIQQVRRKKRSLHEETPRKGRKEPNRTASRSDKNTKSVTVTKGSGEKKASMTACLFDRVELDGKKGWITGFTGTSCYVKDKEDNYICTSPKYKQVSISRLRILHHCGNWAIGAEKPLGKG

SEQ ID NO: 24661 - protein, 478 aa, unidentified
  REGION 1..478: note = Human gut metagenome
MTGNCTRSVKGKNKMPVCVLSANGERLMPTENYGKVRHLLKDGRAVIAKRNPFTIQLTYDTSTYTQPIEMCVGTGYEHIGVSIKTKAKEVVSQQYDMLTNERSRHDDCRAYRRTRRNRLRYRAARFNNRVSGKKPGWIAPSLDNKVERHLDIISRYLSVMPVTDVFIKAATYDTQLLAALEAGEPVPQGKDYQHGPQYGYDTLREAVFERDHYTCVYCKRGLKDGAILHVHHAYYWKGLHGNSMRELATCCEKCNTPANHKEGGKLWGFDKPLRKYTGEAFMNSVRWILYQRAMARFQGVAEVHMTYGVISKRVRTNLGLPYSCATDAYCMGELRPEARCETEVFQKYRRNNRVLSKFYDAKYYDTREKGVIRSGNELSSGRTNRNHNLDGENLRRFRGCKKSKGRTSTRKQRYVMQPGDIVVYGNRKYVSKGCSSYGRALSLLTDGKPLMVSMKKIQLVRHKGGWVRLPHAAAEAKK

SEQ ID NO: 24662 - protein, 433 aa, Moorena sp.
MINVFVLDKDHKPLMPCQPARARRLLRAGRARVHKLHPFTIRLVDRTLADSAVQPVLIKLDPGSKETGIAVVREDEKKTHHALFFINLRHRGASIRDALTARRQLRRGRRSRNLRYRAPRFLNRRRPDGWLPPSLQHRVDTTKSWVDRLRRLVPVSGLAEELVKFDTQKLQNPEISGREYQQGELAGYELKEYLLEKFSRRCVYCRKSGVPLNVEHIVPKARGGSNRVSNLAIACVECNQKKGSKPIEDFLKGNPDLLKRILSQLKTPLRDASAVNSTRRALFNALKETGLPVSVGSGALTKFNRHLYGVPKEHWLDALCVGETRGVVFDERMQVLEIHCAGRGQYKRTRTDRYGFPIAYFMRTKRPHGVGTGDIVRMSVRGGKHPGLWTGRATAKNSGTVVLQMPEFQIGGRAKNCTILARNDGYGYSLTNS

SEQ ID NO: 24663 - protein, 524 aa, unidentified
  REGION 1..524: note = Acidobacteria sp.
VASIHETHAGVARVTPHGQLRPLHPEADDGAGTRSRRTTTAGPDPGPVRSITRGEAEDPETGPGSTRPAARKRQHTPRRANRVFVIGSDGKPLMPCTVRRARQLIDAGRVRRRDYRPYTIHLKDRCTGDGRTAVQPVEVRCRPGPRHTGIAVVATLDDHDRVLYQEEIDHRTDISRRLIQRKAHRRRRRATKWFRKPRFDNRRRPAGWLPPSIESVVSNQQHRIERLAQRSGASTACIQTGKFDTHKILDPSVSGKGYQQGPLYQRHLREYIATQYDHRCVYCGKGDWEDATRFNLDHIVPRSAGGATNIRNLVWSCQPCNQRKGDRPVREFLRENPERINAVLRQRPVPLAAAGQYAAICKRLVRRLEDSGLETSETTGADTAHARSAAGIVKTHANDAACCRSSGEIDSLRTPTTLKAAGHGRRKQIKSLPVGPYLAWRHQKPTTRRATPCPGHARHPNHVHRIRTGDTVRILTTDGWRKGEAQVEASRQRVHVRTSQARYSTSKATHIRRIATANGYRESN

SEQ ID NO: 24664 - protein, 478 aa, unidentified; identical to SEQ ID NO: 24531
  REGION 1..478: note = Human gut metagenome

SEQ ID NO: 24665 - protein, 464 aa, unidentified
  REGION 1..464: note = Human gut metagenome
MAVCVLSANGERLMPTENYGKVRHLLKDGRAVIAKRNPFTIQLTYDTSTYTQPIEMCVGTGYEHIGVSIKTKAKEVVSQQYDLLTNERSRHDDCRAYRRTRRNRLRYRAARFNNRVSSKKPGWIAPSLDNKVERHLDIISRYLSVMPVKDVFIKAATYDTQLLAALEAGEPVPQGKDYQHGPQYGYDTLREAVFERDHYTCVYCKRGLKDGAILHVHHAYYWKGLHGNSMRELATCCEKCNTPANHKEGGKLWGFDKPLRKYTGEAFMNSVRWILYQRAMARFQGAAEVHMTYGVISKRVRTDLGLPYSCATDAYCMGELRPEARCETEVFQKYRRNNRVLSKFYDAKYYDTREKGVIRSGNELSSGRTNRNHNLDGENLRRFRGCKKSKGRTSTRKQRYAMQPGDIVVYGNRKYVSKGCSSYGRALSLLTDGKPLMVSMKKIQLVRHKGGWVRLPHAAAEAKK

SEQ ID NO: 24666 - protein, 452 aa, Lactobacillus sp.; identical to SEQ ID NO: 24570

SEQ ID NO: 24667 - protein, 435 aa, Moorena sp.
MAVLILDKRKNPLMPCSEKRARLLLERGRARVHRKAPFIIRLVDRGVEDSALQPLRLKLDPGSKTTGIALVRERETVDPATGKSTRAQAVVFLAELAHRGHLIRDRLTARRAFRRRRRGTLRYRAPRFLNRTRPRGWLAPSLRHRVDTTMAWVDRLMRWAPVAGLSTLLHRFDTQALQNPEISGIEYQQGTLTGYEVREYLLEKWGWRCAYCDVENVPLTVDHIHPKSRGGSDRVSNLALACVPCNQRKGNRDVTEFLLHDPKRLAHIEAQRKAPLKDAAAVNSTRWALLGRLKETGLDVEVGTGGRTKYNRARQQCPKTHWVDAACGGPPGALVRLDPETKPLAIRATGHGERQRARLNRYGFPRGHKPRRRSFLGWRTGAIARCDKPGVRAFVGRVAIRFRPSFVITGPDGKKAETHPKYLHIVQKGDGYAYA

SEQ ID NO: 24668 - protein, 478 aa, unidentified; identical to SEQ ID NO: 24531
  REGION 1..478: note = Human gut metagenome

SEQ ID NO: 24669 - protein, 608 aa, Streptomyces sp.
VTRVGYVPRRTEDPPPVLPQQLALEFESADNPGIRDETGLERRKAPGVKHVRGETTSSTPAAGGVTPDHQVREPGREADPAVFVLDKHGTPLQPTTPARARKLLASGRAVVARHTPFVIRLKDRTANHSQVDGVEIGIDPGSKHTGIAVFTTVTGERRGRYSIQLDHRGAAIRKKLERRAAYRRGRRTRNLRYRAPRFLNRTRPKGWLPPSLRHRVDTTTSWVDRLARWAPVKAVHVERVAFDTNAISAGRPLEGAEYQHGTLHGTEVREYLLAKFGRACVYCGAMGVPLNIDHIRPRSRGGSDRVANLTLACIPCNQAKSSRPVEEFAPKRAAEILKRAKAPLRDAAAVNATTWALWRPWTHACPPAPRPAGAPSGTAPGAPCPTPTPWTPSPSANSTPSPPGPAPSWSSGRPDAASTSAPAPTSTASPAYACPASSSSSATPPATSSGPSSPRGRTRAPTPAASPSAPPGTSPSEPQAASTPPGTSTSASSSEPTATPTPANPKEPRLDPRPRFIQRRSARRRTAYPPPRSAEASFPPRPEDRGIHEGHPMTVRVYSVDRSGVVAWERPEVRVTTAEPPDVLGSSLNWPLCACERATGTPCPAGRA

SEQ ID NO: 24670 - protein, 460 aa, unidentified; identical to SEQ ID NO: 24549
  REGION 1..460: note = Human gut metagenome

SEQ ID NO: 24671 - protein, 452 aa, Moorena sp.; identical to SEQ ID NO: 24570

SEQ ID NO: 24672 - protein, 433 aa, unidentified
  REGION 1..433: note = Human gut metagenome
MQSHIRAFVLDKDRKPLMPCHAARARKLLKKGKAAVFRRFPFTIILKERTREVSAVQDVLVKIDPGSKSTGIAVVRKDEKNVHHALAFICLNHRGSKIRDALTSRRQLRRGRRSRNLRYRAPRFLNRKKPKGWLAPSLQHRVDAVMSWMNRLTRLVPVAGFVQELVKFDTQLMQNAAISGVEYQQGELAGYELKEYLLEKFDRKCVYCGKSGVVLNVEHIIPKARGGSNRVSNLAIACAQCNQKKGAMPIEDFLKKKPALLAQIRKQLKTPLRDATAVNATRWALYRNLQATGCTVEVDSGALTKFNRHAFSVPKEHWLDALCAGRIDGVADWENLRPLQAYCIGRGSHKRTRTDKYGFPLCYFSRYKRPNDFGTGDYVRVKVTRGRNTGIWIGRATLTDGKLSVETKAGRVKATFLNSKCLFKSDGYKYQYL

SEQ ID NO: 24673 - protein, 464 aa, unidentified; identical to SEQ ID NO: 24525
  REGION 1..464: note = Human gut metagenome

SEQ ID NO: 24674 - protein, 442 aa, Symploca sp.
MKVCVVNIGERPLMPTTPRKAKILLREGAAKIFRRDPFTIQLLSDCHGYIQPATLGIDAGYLNIGYSALNQTAELIGGEVKMLEGISERITEKLKYRRTRRNRLRYRAPRFDNRRRNDGWLTPSIQHKLDTHHRLIDRIKSVLPIDEVMIEVANFDIQKIKNQEISGDGYQQGEQKGFDNLREYLLHRDGHKCQHPECRNKSKQPILQVHHLGFWKNPPDRTERPGNLITLCNKCHTPAQHKKKGKLFGWEPKIKPFKPETFMSTVRWRLTKDTGYKVTFGYITKAKRRLLKLDKSHHNEAFVIAGGEYQTRCEALNLVQIRRNKRSMEQFYDAKYLDIRDKKSKSGTELFSGRRTRNKNLNSENLRAYRGHKLFKGQRRVKKLRYRYQPHDEVEFEGAVFEVVGMQNQGTGVKLKDYPGIKNKVVKISAVKSVKKRGGICA

SEQ ID NO: 24675 - protein, 464 aa, unidentified; identical to SEQ ID NO: 24601
  REGION 1..464: note = Human gut metagenome

SEQ ID NO: 24676 - protein, 480 aa, unidentified
  REGION 1..480: note = mine drainage metagenome
MEKRCEMAVYVLDKKKQPLMPCSEKRARLLLERGRAVVHKIYPFTIRLKDRVGGALQPLRLKIGPASHKTGIALVRESETVDPVTGEVQRVEHVINLIDLEHRGGLISKKLEQRSNMRGGRRHRKTRYRPARFNNRSRPEGWLPPSLQHRVDTTESWCNRLTSLAPITAISTMLHRFDTQKLQDPEISGIEYQQGTLFGYEVREYLLEKWGRTCTYCDADDKPLQVEHILAKANGGTDRISNLTLACEPCNQEKGKLFLPEFLSTGKKRFRRFERNARHFATTGKGNIDAKKLAERKQHEVTRLARIQAQAKAPLKDVAAINATRAAVLRMLEGTGLPVEISTGGRAKWNRTRFSIPKRHALDAACMGQVDRIEDWDRPYWRVHCDGRGQYQRTNLDKKGRRVGFLPRQKQHHGFQTGDMVRAEVANGVHKGIHMGRVAVRSSGSFKMRTKTGLHDGVKAEDCRLIQRSDGYSYFREHVA

SEQ ID NO: 24677 - protein, 464 aa, unidentified
  REGION 1..464: note = Human gut metagenome
MAVCVLSANGERLMPTENYGKVRHLLKDGRAVIAKRNPFTIQLTYDTSTYTQPIEMCVGTGYEHIGVSIKTKAKEVVSQQYDLLTNERSRHDDCRAYRRTRRNRLRYRAARFNNRVSGKKPGWIAPSLDNKVERHLDIISRYLSVMPVKDVFIKAATYDTQLLAALEAGEPVPQGKDYQHGPQYGYDTLREAVFERDHYTCVYCKRGLKDGAILHVHHAYYWKGLHGNSMRELATCCEKCNTPANHKEGGKLWGFDKPLRKYTGEAFMNSVRWILYQRAMARFQGAAEVHMTYGVISKRVRTNLGLPYSCATDAYCMGELRPEARCETEVFQKYRRNNRVLSKFYDAKYYDTREKGVIRSGNELSSGRTNRNHNLDGENLRRFRGCKKSKGRTSTRKQRYAMQPGDIVVYGNRKYVSKGCSSYGRALSLLTDGKPLMVSTKKIQLVRHKGGWVRLPHAAAEAKK

SEQ ID NO: 24678 - protein, 433 aa, unidentified
  REGION 1..433: note = Human gut metagenome
MQSHIRAFVLDKDKKPLMPCHAAKARKLLKKGKAAVFRRFPFTIILKERTREASAIQDVLVKVDPGSKSTGLAVVRKDEKNLHHALAFICLNHRGSKIRDALTSRRQLRRGRRSRNLRYRAPRFLNRKKPKGWLAPSLQHRVDAVMSWMNRLTRLVPVAGFVQELVKFDTQLMQNAAISGVEYQQGELAGYELKEYLLEKFDRKCVYCGKSGVVLNVEHIIPKARGGSNRVSNLAIACAQCNQKKGAMPIEDFLKKKPALLAQIRKQLKTPLRDATAVNATRWALYRNLQATGCTVEVGSGALTKFNRHAFSVPKEHWLDALCAGRIDGVADWENLRPLQAYCIGRGSHKRTRTDKYGFPLCYFSRYKRPNDFGTGDYVRVKVTRGRNTGIWIGRATLTDGKLSVETKAGRVKATFLNSKCLFKSDGYKYQYL

SEQ ID NO: 24679 - protein, 423 aa, Moorena sp.
MSKKVYVQNKDGTPLMPCKPAKARHLLGDDKAEVVQRTPFTIRLKWDCEDNTQKVRVGLDTGSKKAGVSAVREDGEVLYQSKVQLRTDIRSKMDRRRRYRRSRRSRKTRHREPKFDNRRREEGWLPPSLKSKAESMGKAVKKVSEILPVEGVNVEIAPFDMQKVKDPDIEGEEYQNGELKGHTSVRQYVLYRDKHQCINCKKDDVPLQTHHIQPRSEGGTDKPSNMVSLCVECHEKVHSGEIELSERSLKYWTNKEYRFASHVNSMKDRIVDELRRLFDDVKVIFGNMTKAVRKKLGLDKSDVNDSIAVASMDLIDKDFVSKLEYTFVKKCIPKGRYRLHKGERSEVRISADNSDYFGFNRWDKVELLDGTVGFVKGRRKSGYFDISDIHGNSYDHSIKHGKLELISRADTIITEVKGNSSPQ

SEQ ID NO: 24680 - protein, 500 aa, unidentified
  REGION 1..500: note = metagenome
MTGSYTVKRRKRFPTVVDIPHRMTGNCTRSVKEKNKMPVCVLSANGERLMPTENYGKVRHLLKDGRAVIAKRNPFTIQLTYDTSTYTQPIEMCVGTGYEHIGVSIKTKAKEVVSQQYDLLTNERSRHDDCRAYRRTRRNHLRYRAARFNNRVSSKKPGWIAPSLDNKVERHLDIISRYLSVMPVTDVFIKAATYDTQLLAALEAGEPVPQGKDYQHGPQYGYDTLREAVFERDHYTCVYCKRGLKDGAILHVHHAYYWKGLHGNSMRELATCCEKCNTPANHKEGGKLWGFDKPLRKYTGEAFMNSVRWILYQRAMARFQGVAEVHMTYGVISKRVRTNLGLPYSCATDAYCMGELRPEARCETEVFQKYRRNNRVLSKFYDAKYYDTREKGVIRSGNELSSGRTNRNHNLDGENLRRFRGCKKSKGRTSTRKQRYAMQPGDIVVYGNRKYVSKGCSSYGKALSLLTDGKPLMVSMKKIQLVRHKGGWVRLPHAAAEAKK

SEQ ID NO: 24681 - protein, 443 aa, unidentified
  REGION 1..443: note = Human gut metagenome
MMKVFVLDKDHKPLMPCGPARARKLLKAGRARVHKLQPFTIRIVDRSLADSVVQKVVVKVDPGSKETGIAVVREDEEETHHALYFINLKHRGAAIRDALTSRRQLRRGRRSRNLRYRAPRFLNRSKPKGWLPPSLQHRVDTTLSWVNRLRRLAPVSGIAQELVKFDTQLMQNPDISGVEYQQGELAGYELKEYLLEKFGRRCVYCAKSDVPLNVEHIVPKARGGSNRLSNLAIACVECNQKKGAKPIEEFLKGKPELLARVRKQLKTPLRDVASVNATRWALFHALSATGLPVRTGSGALTKYNRHCFGVPKEHWFDALCVGRINGVSYDSCMKVLNVSCTGRGQYKRTRTDKFGFPICHFMRTKRPHGVGLGDLVRMTVQKGKHPGIWTGRAFPSNDGRVVLILPEFRIWGRARNCSILSLSDGYGYRLTDSETTKPTSFGK

SEQ ID NO: 24682 - protein, 433 aa, unidentified
  REGION 1..433: note = Human gut metagenome
MQSHIRAFVLDKDRKPLMPCHAAKARKLLKKGKAAVFRRFPFTIILKERTREASAIQDVLVKVDPGSKSTGLAVVRKDEKNLHHALAFICLNHRGSKIRDALTSRRQLRRGRRSRNLRYRAPRFLNRKKPKGWLAPSLQHRVDAVMSWMNRLTRLVPVAGFVQELVKFDTQLMQNAAISGVEYQQGELAGYELKEYLLEKFDRKCVYCGKSGVVLNVEHIIPKARGGSNRVSNLAIACAQCNQKKGAMPIEDFLKKKPALLAQIRKQLKTPLRDATAVNATRWALYRNLQATGCTVEVGSGALTKFNRHAFSVPKEHWLDALCAGRIDGVADWENLRPLQAYCIGRGSHKRTRTDKYGFPLCYFSRYKRPNDFGTGDYVRVKVTRGRNTGIWIGRATLTDGKLSVETKAGRVKATFLNSKCLFKSDGYKYQYL

SEQ ID NO: 24683 - protein, 442 aa, Scytonema sp.; identical to SEQ ID NO: 24530

SEQ ID NO: 24684 - protein, 464 aa, unidentified
  REGION 1..464: note = Human gut metagenome
MAVCVLSANGERLMPTENYGKVRHLLKDGRAVIAKRNPFTIQLTYDTSTYTQPIEMCVGTGYEHIGVSIKTKAKEVVSQQYDLLTNERSRHDDCRAYRRTRRNRLRYRAARFNNRVSSKKPGWIAPSLDNKVERHLDIISRYLSVMPVKDVFIKAATYDTQLLAALEAGEPVPQGKDYQHGPQYGHDTLREAVFERDHYTCVYCKRGLKDGAILHVHHAYYWKGLHGNSMRELATCCEKCNTPANHKEGGKLWGFDKPLRKYTGEAFMNSVRWILYQRAMARFQGAAEVHMTYGVISKRVRTDLGLPYSCATDAYCMGELRPEARCDTEVFQKYRRNNRVLSKFYDAKYYDTREKGVIRSGNELSSGRTNRNHNLDGENLRRFRGCKKSKGRTSTRKQRYAMQPGDIVVYGNRKYVSKGCSSYGRALSLLTDGKPLMVSTKKIQLVRHKGGWVRLPQAAVGAKE

SEQ ID NO: 24685 - protein, 433 aa, unidentified
  REGION 1..433: note = Human gut metagenome
MQPHIRAFVLDKDRKPLMPCHAARARKLLKKGKAAVFRRFPFTIILKERTREASAVQDVLVKIDPGSKSTGIAVVRKDKKDVHHALAFICLNHRGSKIRDALTSRRQLRRGRRSRNLRYRAPRFLNRTKPQGSLAPSLRHRVDTVMSWMNRLTRLVPVTGFVQELVKFDTQLMQNAAISGVEYQQGELAGYELKEYLLEKFDRKCVYCGKSGVVLNVEHIIPKARGGSNRVSNLAIACVQCNQKKGAMPIEDFLKKKPALLAQIRKQLKTTLRDAAAVNATRWSLFRSLQSTGCTVEVGSGAQTKFNRHAFSVPKEHWLDALCTGRIDGVADWEKLRPLQAYCIGRGSHKRTRTDKYGFPLCYFSRRKRPNDFGTGDYVRVKVTRGRNAGIWTGRATLTDGKLSVETKAGRVKATFLNSKCLFKSDGYKYQYL

SEQ ID NO: 24686 - protein, 417 aa, unidentified
  REGION 1..417: note = Human gut metagenome
MVYVLDINGHPLMPTERHGKVKHLLKNGKAKVVKRCPFTIQLLYKSLTYTQSIILGVDAGSKHIGLSATTNDKEFYASDVELRTDIVKLISKRRELRRSRRNRKTRYRQARFDNRKRKDGWLAPSISQKIKCHIKVVENVHKILPITNIVVETASFDIQKIKNPNIKDTEYQQGEQLDFWNVREYVLFRDEHICQCCKGKTKDKILNVHHIESRKTGGNAPNNLITLCETCHKGYHNGTVRLPKTIKRGIIFRDAAFMGIMRWAFYNKLREKYKNVSMTYGYITKNTRIENKLPKKHYVDARCISGHPLAKPSEMIYYQKKIRCHNRQLFKINTLKGGTRKRNQSERVIKGYILFDKVKYQGKEYFVFGRRISGFFDIRELNGNKVNKGSINCKKLKLIERCSGYLIELRKETVLLS

SEQ ID NO: 24687 - protein, 443 aa, unidentified; identical to SEQ ID NO: 24617
  REGION 1..443: note = metagenome

SEQ ID NO: 24688 - protein, 443 aa, Sutterella sp.
MMKVFVLDKDHKPLMPCGPARARKLLKAGRARVHKLQPFTIRIVDRSLADSVVQKVVVKVDPGSKETGIAVVREDEEETHHALYFINLKHRGAAIRDALTSRRQLRRGRRSRNLRYRASRFLNRSKPKGWLPPSLQHRVDTTLSWVNRLRRLAPVSGIAQELVKFDTQRMQNPEISGVEYQQGELAGYELKEYLLEKFGRRCVYCAKSGVPLNVEHIVPKARGGSNRLSNLAIACVECNQKKGARPIEEFLKGKPELLARIRKRLKTPLRDAASVNATRWALFEALRATGLPIRTGSGALTKYNRHCFGVPKEHWFDALCVGRINGVSYDSCMKVLNVSCTGRGQYKRTRTDKFGFPICHFMRTKRPHGVGLGDLVRMTVQKGKHPGIWTGRAFPSNDGSVVLILPEFRIKGRARNCSILSLSDGYGYCLTDSETAKPTSFGK

SEQ ID NO: 24689 - protein, 416 aa, Lactobacillus sp.; identical to SEQ ID NO: 24575

SEQ ID NO: 24690 - protein, 464 aa, unidentified; identical to SEQ ID NO: 24525
  REGION 1..464: note = Human gut metagenome

SEQ ID NO: 24691 - protein, 443 aa, Scytonema sp.; identical to SEQ ID NO: 24526

SEQ ID NO: 24692 - protein, 525 aa, unidentified; identical to SEQ ID NO: 24585
  REGION 1..525: note = Human gut metagenome

SEQ ID NO: 24693 - protein, 453 aa, Lactobacillus sp.; identical to SEQ ID NO: 24603

SEQ ID NO: 24694 - protein, 464 aa, unidentified; identical to SEQ ID NO: 24576
  REGION 1..464: note = Human gut metagenome

SEQ ID NO: 24695 - protein, 453 aa, Lactobacillus sp.
MMSEVQKVNYIYVVDSNGTPLMPTSRLGMVRRWLKTGQASWFGNSRHTIQFVRPVTTNTQELTLGVDAGFHLGLSVVGNKREYYASESLRKSEKDRITSRRELRRSRRNRLRHRQARFDNRRRKDGWLTPSMQHRLDFTIREIKRLYTFLPIANLVVEITPFDNQKLLNSNIKPWEYTHGKMNGFKTIKDYLLARDNYRDTLDGKQYLASQLRVHHLVQRKDGGTNQPDNLVLLSDINHSQANHNNGSLAKLRENRQKALDYRGAYFMNILATRLGDYFDEYTTTQGYLTANLRQEYQIEKSHLNDAFIIAGGTDTTLRTNNVYSRQKLRDNNRVLQKFYDARYIDSRDNKTKTGKELSSGRTRRSRELNYTNLRQFRKTKVKRGRISIRRNHYQLRPYDVVLNTQTNKIETVKSVQNSGTVIKFQTGKTCSIKNVVSLYHVNGMLEKKIENI

SEQ ID NO: 24696 - protein, 432 aa, Moorena sp.
MNRVFVLGSTKKPLMPCHPARARELLRKGKAAVFRMEPFTIILSGREDGEVQDIEFKASPGGKATGITLVGLFRSGARLLFGAEIAHRGAAVRASLDSRRSLRHGRRGRKTRYRQPRPNFAKRSRRANCGGKWLPPSVKSRVDNAAVWSARLAPVACAHVETVRFDTQKLQNPEISGVEYQQGTLAGYEVRGYLLAKWGHACAYCGKQDVPLQIEHIRPIALGGTGRVSNLAIACRPCNEKKAAQPVEQFLADRPDVLKKIKAQAKAPLRDVAALNAARFALGNEIGASGLDTRRWSHGRTKLNRTAQGYAWGKWADAACVGESGAAVYIPANFRPLSIKATGRGTRQVVRTDKYGFPRGAAGRCKRVQGFQTGDLVRLVQPKGKYAGTHVGRLAGVRADGRFDIRADGQKITSGHQNFSLIQRGDGYEYRH

SEQ ID NO: 24697 - protein, 391 aa, Sutterella sp.
TIILKERTREASAIQDVLVKVDPGSKSTGLAVVRKDEKNLHHALAFICLNHRGSKIRDALTSRRQLRRGRRSRNLRYRAPRFLNRKKPKGWLAPSLQHRVDAVMSWMNRLTRLVPVAGFVQELVKFDTQLMQNAAISGVEYQQGELAGYELKEYLLEKFDRKCVYCGKSGVVLNVEHIIPKARGGSNRVSNLAIACTQCNQKKGAMPIEDFLKKKPALLAQIRKQLKTPLRDATAVNATRWALYRNLQATGCTVEVGSGALTKFNRHAFSVPKEHWLDALCAGRIDGVADWENLRPLQAYCIGRGSHKRTRTDKYGFPLCYFSRYKRPNDFGTGDYVRVKVTRGRNTGIWIGRATLTDGKLSVETKAGRVKATFLNSKCLFKSDGYKYQYL

SEQ ID NO: 24698 - protein, 373 aa, unidentified
  REGION 1..373: note = Human gut metagenome
YYASESIRKSEKDRITARREYRRTRRNRLRYRKPRFDNRRRKAGWLAPSVQHRLEFTVREIQRLYRFLPISQLVVEVSPFDNQKLANPNIKPWQYTQGKMHGYQTVKDYLLARDHNRDALDGKAYPASQLRVHHLVQRKDGGTNQPDNLVLLSDVHHNQANHVNGTLAKLAANRQRTIDYRGAYFMSLLANRLNHCFPDYVQTQGYLTANLRVRYGIAKSHLNDAFVIAGGTDQCTRTGNVYRREKLRCNNRSLQKFYDAKYIDRRDGKKKAGKELSSGRTKRSCELNYDNQRIYRLRKVSKGRISIRRQHYRLRPHDIVFNTKTRQIEFVKGVNANGKNVILQSGHNVTPGKLICLYHVNGILTAKVPLVLE

SEQ ID NO: 24699 - protein, 365 aa, unidentified
  REGION 1..365: note = Viral metagenome
MQRVLVLDKNRQPLMPCHPARARALLKTGKAAVFRRFPFTLILKERDGGAVQDTRLKLDPGSKTTGLALVADFAQRGKVVVWAAELGHRGAAIRKALEQRRAHRRFRRSRLRYRAPRFLNRTKPDGWLAPSLQHRVDTILTWVLRLRRWAPVTALSQELARFDMQQMQNLEISGIEYQQGELQGYEVREYLLEKWGRTCVYCDIEQVPFTIDHIHPKSLGGSDRVSNLTLACFPCNQRKGAQDVRVFLAHDPERLARIERQCKASLKDAAAVNSTRWALWRRLTATGLSVEVGSGGRTKWNRRSPSVSGPRLRSRRTVWTMCLISTRNISRCCKGVTVMRITNQRGALPLQLNASRFSWSTRAEC

SEQ ID NO: 24700 - protein, 453 aa, Moorena sp.; identical to SEQ ID NO: 24539

SEQ ID NO: 24701 - protein, 478 aa, unidentified
  REGION 1..478: note = Human gut metagenome
MTGNCTRSVKGKNKMPVCVLSANGERLMPTENYGKVRHLLKDGRAVIAKRNPFTIQLTYDTSTYTQPIEMCVGTGYEHIGVSIKTKAKEVVSQQYDMLTNERSRHDDCRAYRRTRRNRLRYRVARFNNRVSGKKPGWIAPSLDNKVERHLDIISRYLSVMPVTDVFIKAATYDTQLLAALEAGEPVPQGKDYQHGPQYGYDTLREAVFERDHYTCVYCKRGLKDGAILHVHHAYYWKGLHGNSMRELATCCEKCNTPANHKEGGKLWGFDKPLRKYTGEAFMNSVRWILYQRAMARFQGVAEVHMTYGVISKRVRTNLGLPYSCATDAYCMGELRPEARCETEVFQKYRRNNRVLSKFYDAKYYDTREKGVIRSGNELSSGRTNRNHNLDGENLRRFRGCKKSKGRTSTRKQRYAMQPGDIVVYGNRKYVSKGCSSYGRALSLLTDGKPLMVSMKKIQLVRHKGGWVRLPHAAAEAKK

SEQ ID NO: 24702 - protein, 443 aa, unidentified; identical to SEQ ID NO: 24540
  REGION 1..443: note = Human gut metagenome

SEQ ID NO: 24703 - protein, 478 aa, unidentified
  REGION 1..478: note = Human gut metagenome
MTGNCTRSVKGKNKMPVCVLSANGERLMPTENYGKVRHLLKDGRAVIAKRNPFTIQLTYDTSTYTQPIEMCVGTGYEHIGVSIKTKAKEVVSQQYDMLTNERSRHDDCRAYRRTRRNRLRYRAARFNNRVSGKKPGWIAPSLDNKVERHLDIISRYLSVMPVTDVFIKAATYDTQLLAALEAGEPVPQGKDYQHGPQYGYDTLREAVFERDHYTCVYCKRGLKDGAILHVHHAYYWKGLHGNSMRELATCCEKCNTPANHKEGGKLWGFDKPLRKYTGEAFMNSVRWILYQRAMARFQGVAEVHMTYGVISKRVRTNLGLPYSCATDAYCMGELRPEARCETEAFQKYRRNNRVLSKFYDAKYYDTREKGVIRSGNELSSGRTNRNHNLDGENLRRFRGCKKSKGRTSTRKQRYAMQPGDIVVYGNRKYVSKGCSSYGRALSLLTDGKPLMVSMKKIQLVRHKGGWVRLPHAAAEAKK

SEQ ID NO: 24704 - protein, 452 aa, Lactobacillus sp.; identical to SEQ ID NO: 24535

SEQ ID NO: 24705 - protein, 464 aa, unidentified
  REGION 1..464: note = Human gut metagenome
MPVCVLSANGERLMPTENYGKVRHLLKDGRAVIAKRNPFTIQLTYETSTYTQPIELCVGTGYEHIGVSIKTKAKEVVSQQYDLLTNERSRHDDCRAYRRTRRNRLRYRAARFNNRVSGKKPGWIAPSLDNKVERHLDIISRYLSVMPVTDVFIKAATYDTQLLAALEAGEPVPQGKDYQHGPQYGFDTLREAVFERDHYTCVYCKRGLKDGAILHVHHAYYWKGLHGNSMRELATCCEKCNTPANHKEGGKLWGFDKPLRKYTGEAFMNSVRWILYQRAMARFQGAAEVHMTYGVISKRVRTNLGLPYSCATDAYCMGELRPEARCETEVFQKYRRNNRVLSKFYDAKYYDTREKGVIRSGNELSSGRTNRNHNLDGENLRRFRGCKKSKGRTSTRKQRYAMQPGDIVVYGNHKYVSKGCSSYGKALSLLTDGKPLMVSMKKIQLVRHKGGWVRLPHAAAEAKK

SEQ ID NO: 24706 - protein, 478 aa, unidentified; identical to SEQ ID NO: 24531
  REGION 1..478: note = Human gut metagenome

SEQ ID NO: 24707 - protein, 500 aa, unidentified
  REGION 1..500: note = Human gut metagenome
MTGSYTVKRRKRFPTVVDIPHRMTGNCTRSVKGKNKMPVCVLSANGERLMPTENYGKVRHLLKDGRAVIAKRNPFTIQLTYDTSTYTQPIEMCVGTGYEHIGVSIKTKAKEVVSQQYDLLTNERSRHDDCRAYRRTRRNHLRYRAARFNNRVSSKKPGWIAPSLDNKVERHLDIISRYLSVMPVTDVFIKAATYDTQLLAALEAGEPVPQGKDYQHGPQYGYDTLREAVFERDHYTCVYCKRGLKDGAILHVHHAYYWKGLHGNSMRELATCCEKCNTPANHKEGGKLWGFDKPLRKYTGEAFMNSVRWILYQRAMARFQGVAEVHMTYGVISKRVRTNLGLPYSCATDAYCMGELRPEARCETEVFQKYRRNNRVLSKFYDAKYYDTREKGVIRSGNELSSGRTNRNHNLDGENLRRFRGCKKSKGRTSTRKQRYAMQPGDIVVYGNRKYVSKGCSSYGKALSLLTDGKPLMVSMKKIQLVRHKGGWVRLPHAAAEAKK

SEQ ID NO: 24708 - protein, 443 aa, unidentified; identical to SEQ ID NO: 24547
  REGION 1..443: note = Human gut metagenome

SEQ ID NO: 24709 - protein, 431 aa, Acidithiobacillus sp.; identical to SEQ ID NO: 24542

SEQ ID NO: 24710 - protein, 478 aa, unidentified; identical to SEQ ID NO: 24701
  REGION 1..478: note = Human gut metagenome

SEQ ID NO: 24711 - protein, 416 aa, Lactobacillus sp.; identical to SEQ ID NO: 24575

SEQ ID NO: 24712 - protein, 464 aa, unidentified; identical to SEQ ID NO: 24525
  REGION 1..464: note = Human gut metagenome

SEQ ID NO: 24713 - protein, 493 aa, Moorena sp.
VTHVYVLSKSGKPLMPTRPARARHLPKAGEARVVKVTLFTIQLTIDTPETVQPVYAGQDPGLTQGVAAVSEDGEVLFQAEVKCRPDISEKLAERRNYRRSRRYRKTRYRQPRFANRRRPEGWVAPSIRQLKHEHDKLRRLVESILPVTDWAIELNKFDFQKMENPDIQGVQYQNGPQKGYFDVREYVLERDGYACVLCESNVNRKLYHFRGKSDRPKNLVTFCGECHKKAVDKEIPFEVLLESYRWAAEDGYEYLMALEAQTRIDRDMPRRLLEYTALQHREFKKPVYPVVLNLTGRPQTDTYSFDCLDLTVIAFSYRLINLVDLPGEEVLKHGPVGIIPLVPLMRHQLPDEEVLAECARRIEEAPAEWQPDLYFGLALFSSLRYTREIILKIIEVSKMETSPLFDGIREKWIDQGEQRGLQKGLQQGSREERIKAIMEALEENTGCYPEDLGDRLRAIQDMDILKALFRRAVKAKSLEEFTSALNEIAKLNN

SEQ ID NO: 24714 - protein, 478 aa, unidentified; identical to SEQ ID NO: 24701
  REGION 1..478: note = Human gut metagenome

SEQ ID NO: 24715 - protein, 478 aa, unidentified; identical to SEQ ID NO: 24568
  REGION 1..478: note = Human gut metagenome

SEQ ID NO: 24716 - protein, 417 aa, unidentified; identical to SEQ ID NO: 24686
  REGION 1..417: note = Human gut metagenome

SEQ ID NO: 24717 - protein, 500 aa, unidentified
  REGION 1..500: note = Human gut metagenome
MTGSYTVKRRKRFPTVVDIPHRMTGNCTRSVKGKNKMPVCVLSANGERLMPTENYGKVRHLLKDGRAVIAKRNPFTIQLTYDTSTYTQPIEMCVGTGYEHIGVSIKTKAKEVVSQQYDLLTNERSRHDDCRAYRRTRRNHLRYRAARFNNRVSSKKPGWIAPSLDNKVERHLDIISRYLSVIPVTDVFIKAATYDTQLLAALEAGEPVPQGKDYQHGPQYGYDTLREAVFERDHYTCVYCKRGLKDGAILHVHHAYYWKGLHGNSMRELATCCEKCNTPANHKEGGKLWGFDKPLRKYTGEAFMNSVRWILYQRAMARFQGVAEVHMTYGVISKRVRTNLGLPYSCATDAYCMGELRPEARCETEVFQKYRRNNRVLSKFYDAKYYDTREKGVIRSGNELSSGRTNRNHNLDGENLRRFRGCKKSKGRTSTRKQRYAMQPGDIVVYGNRKYVSKGCSSYGKALSLLTDGKPLMVSMKKIQLVRHKGGWVRLPHAAAEAKK

SEQ ID NO: 24718 - protein, 443 aa, Scytonema sp.; identical to SEQ ID NO: 24526

SEQ ID NO: 24719 - protein, 460 aa, unidentified
  REGION 1..460: note = Human gut metagenome
LARGTLRQRSILWNRLLPDSRKGKDFFMQPHIRAFVLDKDRKPLMPCHAARARKLLKKGKAAVFRRFPFTIILKERTREASAVQDVLVKIAPGSKSTGIAVVRKDKKDVHHALAFICLNHRGSKIRDALTSRRQLRRGRRSRNLRYRAPRFLNRTKPQGSLAPSLRHRVDTVMSWMNRLTRLVPVTGFVQELVKFDTQLMQNAAISGVEYQQGELAGYELKEYLLEKFDRKCVYCGKSGVVLNVEHIIPKARGGPNRVSNLAIACVQCNQKKGAMPIEDFLKKKPALLAQIRKQLKTTLRDAAAVNATRWSLFRSLQSTGCTVEVGSGAQTKFNRHAFSVPKEHWLDALCTGRIDGVADWEKLRPLQAYCIGRGSHKRTRTDKYGFPLCYFSRRKRPNDFGTGDYVRVKVTRGRNAGIWTGRATLTDGKLSVETKAGRVKATFLNSKCLFKSDGYKYQYL

SEQ ID NO: 24720 - protein, 478 aa, unidentified; identical to SEQ ID NO: 24701
  REGION 1..478: note = Human gut metagenome

SEQ ID NO: 24721 - protein, 417 aa, unidentified; identical to SEQ ID NO: 24686
  REGION 1..417: note = Human gut metagenome

SEQ ID NO: 24722 - protein, 464 aa, unidentified
  REGION 1..464: note = Human gut metagenome
MPVCVLSANGERLMPTENYGKVRHLLKDGRAVIAKRNPFTIQLTYETSTYTQPIELCVGTGYEHIGVSIKAKAKEVVSQQYDLLTNERSRHDDCRAYRRTRRNRLRYRAARFNNRVSSKMPGWIAPSLDNKVERHLDIISRYLSVMPVKDVFIKAATYDTQLLAALEAGEPVPQGKDYQHGPQYGYDTLREAVFERDHYTCVYCKRGLKDGAILHVHHAYYWKGLHGNSMRELATCCEKCNTPANHKEGGKLWGFDKSLRKYTGEAFMNSVRWILYQRAMARFQGAAEVHMTYGVISKRVRTNLGLPYSCATDAYCMGELRPEARCETEVFQKYRRNNRVLSKFYDAKYYDTREKGVIRSGNELSSGRTNRNHNLDGENLRRFRGCKKSKGRTSTRKQRYAMQPGDIVVYGNRKYVSKGCSSYGKALSLLTDGKPLMVSMKKIQLVRHKGGWVRLPHAAAEAKK

SEQ ID NO: 24723 - protein, 478 aa, unidentified; identical to SEQ ID NO: 24531
  REGION 1..478: note = Human gut metagenome

SEQ ID NO: 24724 - protein, 443 aa, unidentified; identical to SEQ ID NO: 24639
  REGION 1..443: note = Human gut metagenome

SEQ ID NO: 24725 - protein, 445 aa, Moorena sp.; identical to SEQ ID NO: 24593

SEQ ID NO: 24726 - protein, 470 aa, unidentified; identical to SEQ ID NO: 24626
  REGION 1..470: note = Human gut metagenome

SEQ ID NO: 24727 - protein, 452 aa, Moorena sp.; identical to SEQ ID NO: 24570

SEQ ID NO: 24728 - protein, 477 aa, unidentified
  REGION 1..477: note = Human gut metagenome
MTGSYTRLREEKKMAVCVLSANGERLMPTENYGKVRHLLKDGRAVIAKRNPFTIQLTYETSTYTQPIELCVGTGYEHIGVSIKTKAKEVVSQQYDLLTNERSRHDDCRAYRRTRRNHLRYRAARFNNRVSGKKPGWIAPSLDNKVERHLDIISRYLSVMPVTDVFIKAATYDTQLLAALEAGEPVPQGKDYQHGPQYGFDTLREAVFERDHYTCVYCKRGLKDGAILHVHHAYYWKGLHGNSMRELATCCEKCNTPANHKEGGKLWGFDKPLRKYTGEAFMNSVRWILYQRAMARFQGAAEVHMTYGVISKRVRTDLGLPYSCATDAYCMGELRPEARCETEVFQKYRRNNRVLSKFYDAKYYDTREKGVIRSGNELSSGRTNRNHNLDGENLRRFRGCKKSKGRTSTRKQRYAMQPGDIVVYGNRKYVSKGCSSYGRALSLLTDGKPLVVSMKKIQLVRHKGGWVRLPQAAAGAKE

SEQ ID NO: 24729 - protein, 453 aa, Lactobacillus sp.; identical to SEQ ID NO: 24539

SEQ ID NO: 24730 - protein, 443 aa, unidentified; identical to SEQ ID NO: 24617
  REGION 1..443: note = Human gut metagenome

SEQ ID NO: 24731 - protein, 478 aa, unidentified; identical to SEQ ID NO: 24531
  REGION 1..478: note = Human gut metagenome

SEQ ID NO: 24732 - protein, 478 aa, unidentified; identical to SEQ ID NO: 24701
  REGION 1..478: note = Human gut metagenome

SEQ ID NO: 24733 - protein, 426 aa, Verrucomicrobium sp.; identical to SEQ ID NO: 24574

SEQ ID NO: 24734 - protein, 478 aa, unidentified; identical to SEQ ID NO: 24531
  REGION 1..478: note = Human gut metagenome

SEQ ID NO: 24735 - protein, 478 aa, unidentified
  REGION 1..478: note = Human gut metagenome
MTGNCTRRVKGKNKMPVCVLSANGERLMPTENYGKVRHLLKDGRAVIAKRNPFTIQLTYDTSTYTQPIEMCVGTGYEHIGVSIKTKAKEVVSQQYDMLTNERSRHDDCRAYRRTRRNRLRYRAARFNNRVSGKKPGWIAPSLDNKVERHLDIISRYLSVMPVTDVFIKAATYDTQLLAALEAGEPVPRGKDYQHGPQYGYDTLREAVFERDHYTCVYCKRGLKDGAILHVHHAYYWKGLHGNSMRELATCCEKCNTPANHKEGGKLWGFDKPLRKYTGEAFMNSVRWILYQRAMARFQGVAEVHMTYGVISKRVRTNLGLPYSCATDAYCMGELRPEARCETEVFQKYRRNNRVLSKFYDAKYYDTRENGVIRSGNELSSGRTNRNHNLDGENLRRFRGCKKSKGRTSTRKQRYAMQPGDIVVYGNRKYVSKGCSSYGRALSLLTDGKPLMVSMKKIQLVRHKGGWVRLPHAAAEAKK

SEQ ID NO: 24736 - protein, 386 aa, unidentified
  REGION 1..386: note = Human gut metagenome
MTGNCTRSVKGKNKMPVCVLSANGERLMPTENYGKVRHLLKDGRAVIAKRNPFTIQLTYDTSTYTQPIEMCVGTGYEHIGVSIKTKAKEVVSQQYDMLTNERSRHDDCRAYRRTRRNRLRYRAARFNNRVSGKKPGWIAPSLDNKVERHLDIISRYLSVMPVTDVFIKAATYDTQLLAALEAGEPVPQGKDYQHGPQYGYDTLREAVFERDHYTCVYCKRGLKDGAILHVHHAYYWKGLHGNSMRELATCCEKCNTPANHKEGGKLWGFDKPLRKYTGEAFMNSVRWILYQRAMARFQGVAEVHMTYGVISKRVRTNLGLPYSCATDAYCMGELRPEARCETEVFQKYRRNNRVLSKFYDAKYYDTREKGVIRSGNELSSGRTNRN

SEQ ID NO: 24737 - protein, 436 aa, Bacillus sp.
MFVFVINKHGKALMPCSQRKARILLKTKKAKIIKYQPFTIQLLYGSYGYKQKVKVGIHLGARRLGIAIQSNNHVLAKGEIELRDDIKNNLESRKVYRRNRRNRKCRYRKARFLNRISSKREGWLPPSIRSRSENMFHWIDRFCSLIPDPTLIIQIGKFDFQKIINSHHQNQGDQKGELCSYYNTRYFVFTRDHYTCQVCRKKNKILNTHHIIYRSHGGSNCASNLISVCTDCHTNENHQKGQILWRWMMDKKSPLTYKESPFIHTLRKQIFLKYPNAEFTYGSMTVLKRKRLGLEKSYMNDVLALSDIRKYYEDRSGVFKIKQFRKKKRSLHEATARKGRKAKNITNKRNEKNTKQLKGFFLNDKVRLYNKLGYITGFTGKNSAYVKTIDNEYIIMPNKNYKQVSLSHLERICHNNNWQFTHSPHVNDSGSSVNNK

SEQ ID NO: 24738 - protein, 478 aa, unidentified
  REGION 1..478: note = Human gut metagenome
MTGNCTRSVKGKNKMPVCVLSANGERLMPTENYGKVRHLLKDGRAVIAKRNPFTIQLTYDTSTYTQPIEMCVGTGYEHIGVSIKTKAKEVVSQQYDMLTNERSRHDDCRAYRRTRRNRLRYRAARFNNRVSGKKPGWIAPSLDNKVERHLDIISRYLSVMPVTDVFIKAATYDTQLLAALEAGEPVPQGKDYQHGPQYGYDTLREAVFERDHYTCVYCKRGLKGGAILHVHHAYYWKGLHGNSMRELATCCEKCNTPANHKEGGKLWGFDKPLRKYTGEAFMNSVRWILYQRAMARFQGVAEVHMTYGVISKRVRTNLGLPYSCATDAYCMGELRPEARCETEVFQKYRRNNRVLSKFYDAKYYDTREKGVIRSGNELSSGRTNRNHNLDGENLRRFRGCKKSKGRTSTRKQRYAMQPGDIVVYGNRKYVSKGCSSYGRALSLLTDGKPLMVSMKKIQLVRHKGGWVRLPQAAAGAKE

SEQ ID NO: 24739 - protein, 374 aa, unidentified
  REGION 1..374: note = IscB polypeptide
MMPCSPARARKLLHLKKAKVVKKCPFTIQLSYGSSGYKQEMVGSIVPSSSTIGIAAKSNEKCLYSSEIVVRQDISKKMDGRKTYRNRRRNRKTRYRKARFLNRKSDRRHTPTVNSKIESHIREINRVQKLLPVSKWLVVKASKVEGHFKNGSLDEQWLNLQRQTFERDGFKCRHCKKRGKELHAHHIIHRQDGGEDSIDNLVTLDKDCHVKYHQGKLELKIGEHKFRGKIDTELAILRKNLDLANSENVYGFQAKVKRKLLGLEYSPSNDACAILEVTPQNTFLVKNVPKGDYQRTRGVRSQQKVPKNKIVGFNRYDKIEYENNIYFIKMRMSIGYFKLTDIYNREVPKVIAGRKLKLLGRRKSCLIVNKTFHP

SEQ ID NO: 24740 - protein, 443 aa, unidentified
  REGION 1..443: note = metagenome
MMKVFVLDKDHKPLMPCGPARARKLLKAGRARVHKLQPFTIRIVDRSLADSVVQKVVVKVDPGSKETGIAVVREDEEETHHALYFINLKHRGAAIRDALTSRRQLRRGRRSRNLRYRAPRFLNRSKPKGWLPPSLQHRVDTTLSWVNRLRRLAPVSGIAQELVKFDTQLMQNPDISGVEYQQGELAGYELKEYLLEKFGRRCVYCAKSDVPLNVEHIVPKARGGSNRLSNLAIACVECNQKKGAKPIEEFLKGKPELLARVRKQLKTPLRDAASVNATRWALFHALSATGLPVRTGSGALTKYNRHCFGVPKEHWFDALCVGRINGVSYEPGMKVLNVSCTGRGQYKRTRTDKFGFPICHFMRTKRPHGVGLGDLVRMTVQKGKHPGIWTGRAFPSNDGSVVLILPEFRIKGRARNCSILSLSDGYGYCLTDSETAKPTSFGK

SEQ ID NO: 24741 - protein, 452 aa, Lactobacillus sp.; identical to SEQ ID NO: 24570

SEQ ID NO: 24742 - protein, 460 aa, unidentified
  REGION 1..460: note = Human metagenome
LARGTLRQRSILWNRLLPDSRKGKDFFMQPHIRAFVLDKDRKPLMPCHAARARKLLKKGKAAVFRRFPFTIILKERTREASAVQDVLVKIDPGSKSTGIAVVRKDKKDVHHALAFICLNHRGSKIRDALTSRRQLRRGRRSRNLRYRAPRFLNRTKPQGSLAPSLRHRVDTVMSWMNRLTRLVPVTGFVQELVKFDTQLMQNAAISGVEYQQGELAGYELKEYLLEKFDRKCVYCGKSGVVLNVEHIIPKARGGSNRVSNLAIACVQCNQKKGAMPIEDFLKKKPALLAQIRKQLKTTLRDAAAVNATRWSLFRSLQSTGCTVEVGSGAQTKFNRHAFSVPKEHWLDALCTGRIDGVADWEKLRPLQAYCIGRGSHKRTRTDKYGFPLCYFSRRKRPNDFGTGDYVRVKVTRGRNAGIWTGRATLTDGKLSVETKAGRVKAAFLNSKCLFKSDGYKYQYL

SEQ ID NO: 24743 - protein, 464 aa, unidentified; identical to SEQ ID NO: 24525
  REGION 1..464: note = Human gut metagenome

SEQ ID NO: 24744 - protein, 464 aa, unidentified; identical to SEQ ID NO: 24576
  REGION 1..464: note = gut metagenome

SEQ ID NO: 24745 - protein, 478 aa, unidentified; identical to SEQ ID NO: 24531
  REGION 1..478: note = Human gut metagenome

SEQ ID NO: 24746 - protein, 401 aa, Moorena sp.
MKVFVLDNQPVALGIDAGYKTIGYSAVSDKGELIGGAVELFKGQSERLKERAMYRRNRRSRQRYRPPRFNNRVKSKKPGWLAPSIKHKLDTHIKLVKKMKAILPITKVVIGVANFDIQAIKNPDISGVEYQQGEQLGFWNVRKYVLHRDHHQCQNPACQNRAKEKVLEVHHLGYWKQDRSNRPSNLITLCTRCHVAENHQPGGLLYGWQPKLKSFKPETFMSIVRWRLVNTLQCNHTYGFITQNNRIKLGLEKSHHNDAFVIAGGTSQARIPPTNWEILRHHNRGREKFYDAVYIDTRTGEKAKGAELNCGRRKRNRNLNGENLRKYRGQKVRKGRRSIRRQDYALQSGDVVLFEGVKRLVKGVFNYGKWVRLGNPGGKAISASIKKVTPLKKRKGLVIVI

SEQ ID NO: 24747 - protein, 500 aa, unidentified
  REGION 1..500: note = Human gut metagenome
MTGSYTAAPPQTEHHAVDVPHRMTGNCTRSVKGKNKMPVCVLSANGERLMPTENYGKVRHLLKDGRAVIAKRNPFTIQLTYDTSTYTQPIEMCIGTGYEHIGVSIKTKAKEVVSQQYDMLTNERSRHDDCRAYRRTRRNRLRYRAARFNNRVSGKKPGWIAPSLDNKVERHLDIISRYLSVMPVTDVFIKAATYDTQLLAALEAGEPVPQGKDYQHGPQYGYDTLREAVFERDHYTCVYCKRGLKDGAILHVHHAYYWKGLHGNSMRELATCCEKCNTPANHKEGGKLWGFDKPLRKYTGEAFMNSVRWILYQRAMARFQGVAEVHMTYGVISKRVRTNLGLPYSCATDAYCMGELRPEARCETEVFQKYRRNNRVLSKFYDAKYYDTREKGVIRSGNELSSGRTNRNHNLDGENLRRFRGCKKSKGRTSTRKQRYAMQPGDIVVYGNRKYVSKGCSSYGRALSLLTDGKPLMVSMKKIQLVRHKGGWVRLPHAAAEAKK

SEQ ID NO: 24748 - protein, 478 aa, unidentified; identical to SEQ ID NO: 24531
  REGION 1..478: note = Human gut metagenome

SEQ ID NO: 24749 - protein, 464 aa, unidentified; identical to SEQ ID NO: 24525
  REGION 1..464: note = gut metagenome

SEQ ID NO: 24750 - protein, 478 aa, unidentified; identical to SEQ ID NO: 24531
  REGION 1..478: note = Human gut metagenome

SEQ ID NO: 24751 - protein, 455 aa, unidentified
  REGION 1..455: note = Human gut metagenome
MTGSYTAAPPQTEHHAVDVPHRMTGNCTRSVKGKNKMPVCVLSANGERLMPTENYGKVRHLLKDGRAVIAKRNPFTIQLTYDTSTYTQPIEMCVGTGYEHIGVSIKTKAKEVVSQQYDMLTNERSRHDDCRAYRRTRRNRLRYRAARFNNRVSGKKPGWIAPSLDNKVERHLDIISRYLSVMPVTDVFIKAATYDTQLLAALEAGEPVPQGKDYQHGPQYGYDTLREAVFERDHYTCVYCKRGLKDGAILHVHHAYYWKGLHGNSMRELATCCEKCNTPANHKEGGKLWGFDKPLRKYTGEAFMNSVRWILYQRAMARFQGVAEVHMTYGVISKRVRTNLGLPYSCATAAYCMGELRPEARCETEVFQKYRRNNRVLSKFYDAKYYDTREKGVIRSGNELSSGRTNRNHNLDGENLRRFRGCKKSKGRTSTRKQRYAMQPGDIVVYGNRKYVSKG

SEQ ID NO: 24752 - protein, 460 aa, unidentified; identical to SEQ ID NO: 24549
  REGION 1..460: note = Human gut metagenome

SEQ ID NO: 24753 - protein, 500 aa, unidentified
  REGION 1..500: note = Human gut metagenome
MTGSYTVKRRKRFPTVVDIPHRMTGNCTRSVKGKNKMPVCVLSANGERLMPTENYGKVRHLLKDGRAVIAKRNPFTIQLTYDTSTYTQPIEMCVGTGYEHIGVSIKTKAKEVVSQQYDLLTNERSRHDDCRAYRRTRRNHLRYRAARFNNRVSSKKPGWIAPSLDNKVERHLDIISRYLSVMPVTDVFIKAATYDTQLLAALEAGEPVPQGKDYQHGPQYGYDTLREAVFERDHYTCVYCKRGLKDGAILHVHHAYYWKGLHGNSMRELATCCEKCNTPANHKEGGKLWGFDKPLRKYTGEAFMNSVRWILYQRAMARFQGVAEVHMTYGVISKRVRTNLGLPYSCATDAYCMGELRPEARCETEVFQKYRRNNRVLSKFYDAKYYDTREKGVIRSGNELSSGRTNRNHNLDGENLRRFRGCKKSKGRTSTRKQRYAMQPGDIVVYGNRKYVSKGCSSYGRALSLLTDGKPLMVSMKKIQLVRHKGGWVRLPHAAAEAKK

SEQ ID NO: 24754 - protein, 443 aa, unidentified
  REGION 1..443: note = Human gut metagenome
MMKVFVLDKDHKPLMPCGPARARKLLKAGRARVHKLQPFTIRIVDRSLADSVVQKVVVKVDPGSKETGIAVVREDEEETHHALYFINLKHRGAAIRDALTSRRQLRRGRRSRNLRYRAPRFLNRSKPKGWLPPSLQHRVDTTLSWVNRLRRLAPVSGIVQELVKFDTQRMQNPEISGVEYQQGELAGYELKEYLLEKFGRRCVYCAKSGVPLNVEHIVPKARGGSNRLSNLAIACVECNQKKGARPIEEFLKGKPELLARIRKRLKTPLRDAASVNATRWALFEALRATGLPIRTGSGALTKFNRHCFGVPKEHWFDALCVGRINGVSYEPGMKVLNVSCTGRGQYKRTRTDKFGFPICHFMRTKRPHGVGLGDLVRMTVQKGKHPGIWTGRAFPSNDGRVVLILPEFRIWGRARNCSILSLSDGYGYRLTDSETTKPTSFGK

SEQ ID NO: 24755 - protein, 443 aa, unidentified; identical to SEQ ID NO: 24617
  REGION 1..443: note = Human gut metagenome

SEQ ID NO: 24756 - protein, 768 aa, Moorena sp.
MSKVFVLDTYEKPLDPVHPGRARILLTQGKASVFRSFPFTLILNTEVKEPVVQPLRIKLDPGSRTTGVAIVNDASGDVVFAAELTHRGHKIKESLQSRRAIRRGRRARKTRYRQPRWHNRRTKKQGWLAPSLESRIANVVTWVHRLSWYCPVSAISMELVRFDMQVMEHAEIAGVEYQQGALQGYEVRQYLLEKWNRQCAYCSKKDIPLEIEHIVPRANGGSDRISNLTLACKPCNKAKGTQDIAVFLKKKPDVLKRIQAQQKAPLNCKRLRNIDRINVAQKPFQLHTSSLYRCSLKGSSVTKAYWFASRPEEVEHQHPFLIFDCQDQLHLPLTIFGKEALVRVSKKTVQGYLYAILPFFGYLETDVWQVRAGRQWDNPPHQIRQAVEDYLVQSLECKVQTHRHGFQLVSITSGTHSTIRIFLSGLKLFYQEMHQRGYYSFSNPLVDAMTTTVAAIEARLAHENDPPRMPEISGVVDARPKNRLSDSYFKLTHEDWVPQIIDDPLLPNLIIEGGKKLSLKSRRLRDECVTWMLFESGARVSEVTGLMLGDWVARGMLREANSFNKGSYGRRTKFLSFSHETVKLLKRYFDSERRRVDPNNYTLDDYLLLAKTKQIDLQTIPLFLSAQRTPLTPKEYREHYWNPACQAAGIEADVHQSRHWHVTCEVRDIYETSKSKEEVHRRLHGLVEYMKWKSKETLEVYEHYFDKQLHDETLEHLHTRMHEAVQDRLEERQQRPPQAKKVQSVGQVGRVSLDEPDLEFLYSLGGEG

SEQ ID NO: 24757 - protein, 435 aa, Moorena sp.
MNRVFVLGSTKKPLMPCHPARARELLRKSKAAVFRMEPFTIILSGREDGEVQDIEFKASPGGKATGIALVGLFRSGARLLFGAEIAHRGAAVRASLDSRRSLRHGRRGRKTRYRQPRPNFAKRSRRANCGGKWLPPSIKSRVDNAAVWSARLARLAPVACAHVETVRFDTQKLQNPEISGIEYQQGTLAGYEVREYLLEKFKRTCAYCGKQGIPLQIEHIQPIALGGTGRVSNLAIACRPCNEKKAAQPVAQFLADRPDVLKKIKAQAKAPLRDVAALNAARFALGNEIGASGLDTRRWSHGRTKLNRTAQGYAWGKWADAACVGESGAAVYIPANFRPLSIKATGRGTRQVVRTDKYGFPRGAAGQCKRVQGFQTGDLVRLVQPKGKYAGTHVGRLAGIRADGRFDIRADGQKITSGHQNFSLIQRGDGYEYRH

SEQ ID NO: 24758 - protein, 478 aa, unidentified
  REGION 1..478: note = Human gut metagenome
MTGNCTRSVKGKNKMPVCVLSANGERLMPTENYGKVRHLLKDGRAVIAKRNPFTIQLTYDTSTYTQPIEMCVGTGYEHIGVSIKTKAKEVVSQQYDMLTNERSRHDDCRAYRRTRRNRLRYRAARFNNRVSGKKPGWIAPSLDNKVERHLDIISRYLSVMPVTDVFIKAATYDTQLLAALEAGEPVPQGKDYQHGPQYGYDTLREAVFERDHYTCVYCKRGLKDGAILHVHHAYYWKGLHGNSMRELATCCEKCNTPANHKEGGKLWGFDKPLRKYTGEAFMNSVRWILYQRAMARFQGVAEVHMTYGVISKRVRTNLGLPYSCATDAYCMGELRPEARCETEVFQKYRRNNRVLSKFYDAKYYDTREKGVIRSGNELSSGRTNRNHNLDGENLRRFRGCKKSKGRTSTRKQRYAMQPGDIVVYGNRKYVSKGCSSYGRALSLLTDGKPLVVSMKKIQLVRHKGGWVRLPQAAAGAKE

SEQ ID NO: 24759 - protein, 455 aa, unidentified
  REGION 1..455: note = Human gut metagenome
MMQKQKQVNYVYVVDANGTPVMPTSRLGMVRRWLKSGQAVWYGNSRTTIQFVRPIDTQTQPLTLGVNTGFHLGMAVVGNDREYYASESIRKSEKDRITARREYRRTRRNRLRYRKPRFNNRRRKAGWLAPSVQHRLEFTVREIQRLYRFLPISQLVVEVSPFDNQKLANPDIKPWEYTQGKMHGYQTVKDYLLARDHNRDALDGQVYPASQLRVHHLVQRKDGGTNQPDNLVLLSDVHHNQANHVNGTLAKLAANRQRTIDYRGAYFMSLLASRLNRYFPDYVQTQGYLTANLRTRYGIVKSHLNDAFVIAGGTDQCTHTGNVYRREKLRCNNRSLQKFYDAKYIDRRDGKKKAGKELSSGRTKRSRELDYDNQRIYRLRKASKGRVSIRRQHYRLRPHDIVFNMKIKQTEFVKSVISNGKSVLLQNGHTVTPRKLVCLHHINGILTVKIPLVLE

SEQ ID NO: 24760 - protein, 433 aa, Moorena sp.
MYIYVQAQDGSPLMPTTRAGKIRHMLRDGRAVIVSYTPFTVRLTYETTRFTQPVSLGVDAGTVHIGLSATTKNKELLSAEIELRTDIVNNLSTRREARRTRRSKRSIRYRESRFNNRRASKKPGWNAPSVEQKVHSHAKSVRDVCRILPITSVTIEVAQFDTQWIKNPGLTGTDYQHGPQLGFWNTREYVLFRDNHECQHCHGKSKDHMLNVHHLESRKTGGNSPDNLITLCETCHKAYHRGEIELKVKRSSKSLRDAAVMSIMRWTVYNQLKDMLAIPVRLTYGYVTKHTRIKNGLEKSYCVDARCISGHPLVIPSEELLHYKQLRRHNRKVMKSNLLPGGRWKRNQAPREIKGFRLFDVVTYNSVPVYVHSRRSTGYFVVKDFEGNTLSNSVSWKSLELKRHSNSYLFNLKKRQGPIPPTDESVGFLGQLS

SEQ ID NO: 24761 - protein, 433 aa, Moorena sp.; identical to SEQ ID NO: 24760

SEQ ID NO: 24762 - protein, 509 aa, Moorena sp.
MAMQPQIFLGKINRGMMEMRKVVYVLDKDGMPLMPETCPGHVHFLLKNRIAKPVCSHPFTIQQIHETGKGMFRPLRGAIRVGRTDIGVAVIDEAGEILYAAHVTSRNREIPRLVEERAEHRHASRRGERQRRKRRAKKNGTTTEFSEGHKLPGYEDDVLEFKDIRNTEAKFNNRKESALDPITRQCVQTHCSVVRLVEKILPVTDWTIVCEDSLIQQMKSGCIPSEKRKFRKHGHLKGIKTQIATQQKGRCALCGKPLACAHHILPAKEGGSDCQENLVGLCQSCHAKVHTNRILLVREGDKKKVNGAVVVKKALPYIYDRFCKLFGKEHVFLCSEAAVATFRKIHGIEETCAMDAACAAAIRNHVDCIIPDGVEIFEIRQFRNHNRAIIQAQTERTYKLDGEIVAKNRRPRFSQKGPALSDWFAETEQREGREAALKKLSQLKVKPSQRRYNDLKRPLPGTLFRYQGKIYVLQAQRTKGRYFIPVGYPDMSIPSKDCEIIGFRSLVYI

SEQ ID NO: 24763 - protein, 464 aa, unidentified; identical to SEQ ID NO: 24684
  REGION 1..464: note = Human gut metagenome

SEQ ID NO: 24764 - protein, 459 aa, Acidithiobacillus sp.; identical to SEQ ID NO: 24571

SEQ ID NO: 24765 - protein, 433 aa, unidentified
  REGION 1..433: note = Human gut metagenome
MQPHIRAFVLDKDRKPLMPCHAARARKLLKKGKAAVFRRYPFTIILKERTREASAVQDVLVKIDPGSKSTGIAVVRKDKKDVHHALAFICLNHRGSKIRDALTSRRQLRRGRRSRNLRYRAPRFLNRTKPQGSLAPSLRHRVDTVMSWMNRLTRLVPVTGFVQELVKFDTQLMQNAAISGVEYQQGELAGYELKEYLLEKFDRKCVYCGKSGVVLNVEHIIPKARGGSNRVSNLAIACVQCNQKKGAMPIEDFLKKKPALLAQIRKQLKTTLRDAAAVNATRWSLFRSLQSTGCTVEVGSGAQTKFNRHAFSVPKEHWLDALCTGRIDGVADWEKLRPLQAYCIGRGSHKRTRTDKYGFPLCYFSRRKRPNDFGTGDYVRVKVTRGRNAGIWTGRATLTDGKLSVETKAGRVKATFLNSKCLFKSDGYKYQYL

SEQ ID NO: 24766 - protein, 478 aa, unidentified; identical to SEQ ID NO: 24531
  REGION 1..478: note = Human gut metagenome

SEQ ID NO: 24767 - protein, 478 aa, unidentified
  REGION 1..478: note = Human gut metagenome
MTGNCTRSVKGKNKMPVCVLSANGERLMPTENYGKVRHLLKDGRAVIAKRNPFTIQLTYDTSTYTQPIEMCVGTGYEHIGVSIKTKAKEVVSQQYDMLTNERSRHDDCRAYRRTRRNRLRYRAARFNNRVSGKKPGWIAPSLDNKVERHLDIISRYLSVMPVTDVFIKAATYDTQLLAALEAGEPVPQGKDYQHGPQHGYDTLREAVFERDHYTCVYCKRGLKDGAILHVHHAYYWKGLHGNSMRELATCCEKCNTPANHKEGGKLWGFDKPLRKYTGEAFMNSVRWILYQRAMARFQGVAEVHMTYGVISKRVRTNLGLPYSCATDAYCMGELRPEARCETEVFQKYRRNNRVLSKFYDAKYYDTREKGVIRSGNELSSGRTNRNHNLDGENLRRFRGCKKSKGRTSTRKQRYAMQPGDIVVYGNRKYVSKGCSSYGRALSLLTDGKPLMVSMKKIQLVRHKGGWVRLPHAAAEAKK

SEQ ID NO: 24768 - protein, 478 aa, unidentified; identical to SEQ ID NO: 24594
  REGION 1..478: note = Human gut metagenome

SEQ ID NO: 24769 - protein, 416 aa, Lactobacillus sp.; identical to SEQ ID NO: 24575

SEQ ID NO: 24770 - protein, 464 aa, unidentified; identical to SEQ ID NO: 24525
  REGION 1..464: note = Human gut metagenome

SEQ ID NO: 24771 - protein, 448 aa, Lactobacillus sp.; identical to SEQ ID NO: 24592

SEQ ID NO: 24772 - protein, 493 aa, Moorena sp.; identical to SEQ ID NO: 24713

SEQ ID NO: 24773 - protein, 443 aa, unidentified; identical to SEQ ID NO: 24617
  REGION 1..443: note = Human gut metagenome

SEQ ID NO: 24774 - protein, 443 aa, unidentified; identical to SEQ ID NO: 24540
  REGION 1..443: note = metagenome

SEQ ID NO: 24775 - protein, 429 aa, unidentified
  REGION 1..429: note = uncultured archaeon
VKLKLKVVSVINKKGGPLMPCTAAKARRLLKSGKAIVVNKCIFTIKLLWQCTAYKQKVSASQTQSNSIFGTAVKINGTCIFSSSTEVRQDIKNKLERRNDYRKTRRNRKTRYRICRFKNRKSARKNAPSVKSKIDSHSREIKRVEKHFPITSWTTVIASTKIGYTGPVKLEWLNLKRQVHERDNYVCLYCKGKTKDYMLHAHHILARANGGLDTLENLITLCETCHTKYHEGKIILKIGKRKIKTKTKNTQVYMIRKNLKFPEDAIKYGTYGFIIKGNRQDLNLESSPINDACSILKIVPDNSYNIKNVSKGDYQRTKCKAKTKGIGRGPQAKKIKKARGKKTNKIIIPKGKLFGYKKFDLIETSKGIGYIKGRRTTGKFSIVTVQGEVIDSLDIRFNSKRVTARKTTLIQEAQFLPPLKGRVSLRKTR

SEQ ID NO: 24776 - protein, 464 aa, unidentified; identical to SEQ ID NO: 24525
  REGION 1..464: note = Human gut metagenome

SEQ ID NO: 24777 - protein, 433 aa, unidentified; identical to SEQ ID NO: 24563
  REGION 1..433: note = Human gut metagenome

SEQ ID NO: 24778 - protein, 417 aa, unidentified; identical to SEQ ID NO: 24686
  REGION 1..417: note = Human gut metagenome

SEQ ID NO: 24779 - protein, 464 aa, unidentified; identical to SEQ ID NO: 24684
  REGION 1..464: note = Human gut metagenome

SEQ ID NO: 24780 - protein, 470 aa, Scytonema sp.; identical to SEQ ID NO: 24577

SEQ ID NO: 24781 - protein, 443 aa, Scytonema sp.; identical to SEQ ID NO: 24642

SEQ ID NO: 24782 - protein, 464 aa, unidentified; identical to SEQ ID NO: 24525
  REGION 1..464: note = gut metagenome

SEQ ID NO: 24783 - protein, 478 aa, unidentified; identical to SEQ ID NO: 24531
  REGION 1..478: note = Human gut metagenome

SEQ ID NO: 24784 - protein, 478 aa, unidentified; identical to SEQ ID NO: 24701
  REGION 1..478: note = Human gut metagenome

SEQ ID NO: 24785 - protein, 464 aa, Symploca sp.
VLRARNLEQHWRRTPPLPVQLYVVEKMRVCVVNIGERPLMPTTPRKAKILLREGAAKIFKRDPFTIQLLSDCHGYIQPATLGIDAGYLNIGYSALNQTAELIGGEVKMLEGMSERITEKLKYRRTRRRRLRYRAPRFDNRKRNDGWLTPSIQHKLDTHRRLIDRIKSVLPIEAVVIEVANFEIQKIKNPEISGNGYQQGEQNGFDNLREYLLHRDGHKCQHRECKNKSKQPILQVHHLGFWKNPPDRTDRPGNLITLCNKCHTPAQHKKKGKLFGWEPKIKPFKPETFMSTVSWRLAKDTGHKVTFGYITKAKRRALKLDKSHQNDAFVIAGGEHQIRCQALNLVQIRRNKRSMEQFYDAKYLDTRNKKPKSGTELFSGRRTRNKNLNSENLRGYRGHKISKGKRAIKTRRYPYRQGDVVLWNNTIFTVRGVHCKGTRAVLHETGKSVALKQIKSLKKTGGFCA

SEQ ID NO: 24786 - protein, 465 aa, unidentified
  REGION 1..465: note = Human gut metagenome
KMPVCVLSANGERLMPTENYGKVRHLLKDGRAVIAKRNPFTIQLTYDTSTYTQPIEMCVGTGYEHIGVSIKTKAKEVVSQQYDMLTNERSRHDDCRAYRRTRRNRLRYRAARFNNRVSGKKPGWIAPSLDNKVERHLDIISRYLSVMPVTDVFIKAATYDTQLLAALEAGEPVPQGKDYQHGPQYGYDTLREAVFERDHYTCVYCKRGLKDGAILHVHHAYYWKGLHGNSMRELATCCEKCNTPANHKEGGKLWGFDKPLRKYTGEAFMNSVRWILYQRAMARFQGVAEVHMTYGVFSKRVRTNLGLPYSCATDAYCMGELRPEARCETEVFQKYRRNNRVLSKFYDAKYYDTREKGVIRSGNELSSGRTNRNHNLDGENLRRFRGCKKSKGRTSTRKQRYAMQPGDIVVYGNRKYVSKGCSSYGRALSLLTDGKPLMVSMKKIQLVRHKGGWVRLPHAAAEVKK

SEQ ID NO: 24787 - protein, 416 aa, Moorena sp.; identical to SEQ ID NO: 24575

SEQ ID NO: 24788 - protein, 453 aa, Moorena sp.; identical to SEQ ID NO: 24539

SEQ ID NO: 24789 - protein, 353 aa, unidentified
  REGION 1..353: note = Human gut metagenome
MKIAHKIINFRSEVDDTMPVSIEKRPFGVTADGQNVYAYIVRNDRISVELIEYGAAIRSLLVNDDGKWTDVVLGYDTLREAVFERDHYTCVYCKRGLKDGAILHVHHAYYWKGLHGNSMRELATCCEKCNTPANHKEGGKLWGFDKPLRKYTGEAFMNSVRWILYQRAMARFQGVAEVHMTYGVISKRVRTNLGLPYSCATDAYCMGELRPEARCEIEVFQKYRRNNRVLSKFYDAKYYDTREKGVIRSGNELSSGRTNRNHNLDGENLRRFRGCKKSKGRTSTRKQRYAMQPGDIVVYGNRKYVSKGCSSYGRALSLLTDGKPLMVSMKKIQLVRHKGGWGRLPHAAAEAKK

SEQ ID NO: 24790 - protein, 413 aa, Moorena sp.
MVYVLDKEGRPIMPTERHGKVRRLLRDGKASVVRLQPFTIRLNYDSDTYKQEVCLGINPGSKHFGVSASSEKKELFSAEVVLRDDIVENISTRRELRRGRRFRKTRYRMPRFKNRGKNEGWLAPSDINRIDMHMKMIRNVHDILPVSKTIIEISNFDIQKIHNPSIKGIEYQQGPQMGFWNVREYVLWRDNHVCRNCFGKSQDPVLEVHHIESPKTGGDAPDNLMTLCKTCHQAYHQGKIDLKGKRGASDRNASAVNKMKQNLIDRATKEFSNVSFTYGYITKNTRISNGIAKSDSSDAFCIAGCISASRLPYLFKCRCVRRHNRSLHVCNPKKGGKRRSNLAPHWIVGTRLQRFDIVKWDGTRCFIFGSSAGRLYLKDIEGSRVSQSATVSAKQVRFLSRKKGSMIMQIVPC

SEQ ID NO: 24791 - protein, 500 aa, unidentified; identical to SEQ ID NO: 24543
  REGION 1..500: note = Human gut metagenome

SEQ ID NO: 24792 - protein, 478 aa, unidentified; identical to SEQ ID NO: 24531
  REGION 1..478: note = Human gut metagenome

SEQ ID NO: 24793 - protein, 464 aa, unidentified
  REGION 1..464: note = Human gut metagenome
MPVCVLSANGERLMPTENYGKVRHLLKDGRAVIAKRNPFTIQLTYETSTYTQPIELCVGTGYEHIGVSIKAKAKEVVSQQYDLLTNERSRHDDCRAYRRTRRNRLRYRAARFNNRVSSKMPGWIAPSLDNKVERHLDIISRYLSVMPVKDVFIKAATYDTQLLAALEAGEPVPQGKDYQHGPQYGYDTLREAVFERDHYTCVYCKRGLKDGAILHVHHAYYWKGLHGNSMRELATCCEKCNTPANHKEGGKLWGFDKPLRKYTGEAFMNSVRWILYQRAMARFQGVAEVHMTYGVISKRVRTNLGLPYSCATDAYCMGELRPEARCETEVFQKYRRNNRVLSKFYDAKYYDTREKGVIRSGNELSSGRTNRNHNLDGENLRRFRGCKKSKGRTSTRKQRYAMQPGDIVVYGNRKYVSKGCSSYGRALSLLTDGKPLMVSMKKIQLVRHKGGWVRLPHAAAEAKK

SEQ ID NO: 24794 - protein, 478 aa, unidentified; identical to SEQ ID NO: 24531
  REGION 1..478: note = Human gut metagenome

SEQ ID NO: 24795 - protein, 417 aa, unidentified; identical to SEQ ID NO: 24686
  REGION 1..417: note = metagenome

SEQ ID NO: 24796 - protein, 376 aa, unidentified
  REGION 1..376: note = Human gut metagenome
MTGNCTRSVKGKNKMPVCVLSANGERLMPTENYGKVRHLLKDGRAVIAKRNPFTIQLTYDTSTYTQPIEMCVGTGYEHIGVSIKTKAKEVVSQQYDMLTNERSRHDDCRAYRRTRRNRLRYRAARFNNRVSGKKPGWIAPSLDNKVERHLDIISRYLSVMPVTDVFIKAATYDTQLLAALEAGEPVPQGKDYQHGPQYGYDTLREAVFERDHYTCVYCKRGLKDGAILHVHHAYYWKGLHGNSMRELATCCEKCNTPANHKEGGKLWGFDKPLRKYTGEAFMNSVRWILYQRAMARFQGVAEVHMTYGVISKRVRTNLGLPYSCATDAYCMGELRPEYDLPQLCRKKEAAKMPRPRPAEELKDMCQNAAEVLNGGH

SEQ ID NO: 24797 - protein, 443 aa, unidentified; identical to SEQ ID NO: 24617
  REGION 1..443: note = Human gut metagenome

SEQ ID NO: 24798 - protein, 500 aa, unidentified; identical to SEQ ID NO: 24707
  REGION 1..500: note = Human gut metagenome

SEQ ID NO: 24799 - protein, 478 aa, unidentified
  REGION 1..478: note = Human gut metagenome
MTGNCTRSVKGKNKMPVCVLSANGERLMPTENYGKVRHLLKDGRAVIAKRNPFTIQLTYDTSTYTQPIEMCVGTGYEHIGVSIKTKAKEVVSQQYDMLTNERSRHDDCRAWGRTRRKRLRYRAARFNNRVSGKKPGWIAPSLDNKVERHLDIISRYLSVMPVTDVFIKAATYDTQLLAALEAGEPVPQGKDYQHGPQYGYDTLREAVFERDHYTCVYCKRCLKDGAILHVHHAYYWKGLHGNSMRELATCCEKCNTPANHKEGGKLWGFDKPLRKYTGEAFMNSVRWILYQRAMARFQGAVEVHMTYGVISKRVRTDLGLPYSCATDAYCMGELRPEARCETEVFQKYRRNNRVLSKFYDAKYYDTREKGVIRSGNELSSGRTNRNHNLDGENLRRFRGCKKSKGRTSTRKQRYAMQPGDIVVYGNRKYVSKGCSSYGRALSLLTDGKPLMVSTKKIQLVRHKGGWVRLPQAAAGAKE

SEQ ID NO: 24800 - protein, 434 aa, unidentified
  REGION 1..434: note = Human gut metagenome
MQPRIRAFVLDKDRKPLMPCHAARARKLLKKGKAAVFRRFPFTIILKERTRESSAVQDVLVKIDPGSKSTGIAVVRKDEKNVHHALAFICLNHRGSKIRDALTSRRQLRRGRRSRNLRYRAPRCLNRTKPQGWLAPSLRHRVDTVMSWMNRLTRLVPVTGFVQELVKFDTQLIQNAAISGVEYQQGELAGYELKEYLLEKFDRKCVYCGKSGVVLNVEHIIPKARGGSNRVSNLAIACVQCNQKKGAMPIEDFLKKKPALLAQIRKQLKTPLRDAAAVNATRWSLFRNLQATGCTVEVGSGALTKFNRHAFSVPKEHWLDALCAGRIDGVADWENLRPLQAYCIGRGPHKRTRTDKYGFPLCYFSRRKRPNDFGTGDYVRVKVTRGRNAGIWTGRATLSDGYLSVETKAGRVKATFQNGKVLFKNDGYKYQYLS

SEQ ID NO: 24801 - protein, 478 aa, unidentified; identical to SEQ ID NO: 24531
  REGION 1..478: note = Human gut metagenome

SEQ ID NO: 24802 - protein, 416 aa, Moorena sp.; identical to SEQ ID NO: 24575

SEQ ID NO: 24803 - protein, 423 aa, Moorena sp.
MSKKVYVQNKDGTPLMPCKPAKARHLLGDDKAEVVQRTPFTIRLKWDCEDNTQKVRVGLDTGSKKAGVSAVREDGEVLYQSKVQLRTDIRSKMDRRRRYRRSRRSRKTRHREPKFDNRRREEGWLPPSLKSKAESMVKAVKKVSEILPVEGVNVEIAPFDMQKVKDPDIEGEEYQNGELKGHTSVRQYVLYRDKHQCINCKKDDVPLQTHHIQPRSEGGTDKPSNMVSLCVECHEKVHSGEIELSERSLKYWTNKEYRFASHVNSMKDRIVDELRRLFDDVKVIFGNMTKAVRKKLGLDKSDVNDSIAVASMDLIDKDFVSKLEYTFVKKCIPKGRYRLHKGERSEVRISADNSDYFGFNRWDKVELLDGTVGFVKGRRKSGYFDISDIHGNSYDHSIKHGKLELISRADTIITEVKGNSSPQ

SEQ ID NO: 24804 - protein, 478 aa, unidentified; identical to SEQ ID NO: 24594
  REGION 1..478: note = Human gut metagenome

SEQ ID NO: 24805 - protein, 436 aa, Bacillus sp.; identical to SEQ ID NO: 24737

SEQ ID NO: 24806 - protein, 433 aa, Sutterella sp.; identical to SEQ ID NO: 24563

SEQ ID NO: 24807 - protein, 483 aa, Moorena sp.
MVLCDRQEANMSGPILVLDAEGTPLMPMAPALARKLTQRGKARFVSHHAFTVLQLPHTVACPALRPITAFITQRPAAAEIILIADGARRSHRLLHIIVDLHTDMVRRLRRRAGHRRRRRARQRYHADRRQGIPFKRRSPAIARSVWRKAHARRQALPHRKPIFSPLIRWRAAALMRVLQALMRLIPISHITLCDAPIAERPAKLARTHAARRTQLEMAYAAEEADHRLRCHYCGTTRGPLQIEHITPQSRGGTDAWQNLVLACAACNQRKGGRTAAEMGHTIQTIRAPAANRTHRTQIHQHLTVRELARQLRPLFPATLRISSSLRVFSDADTDALTARYIAVPVARSRKQTFSSRNYPLSTPMPSRQFVRHKQTIKRRMRVNTALLLPHTASRTRAEVLQAAHAHHGGQQRRVSIGMLCRATRNGEELRGIVSAIHSTGRLTVKLPVWERQGAISWNRTTITSLQSLQILSRERVLFLRDDR

SEQ ID NO: 24808 - protein, 411 aa, Thiomonas sp.
MSVFVLDQHGHPIMPCSEKRARQMLERGRARVHRVMPFTIRLVDRLVEGSALQPLQEKIDPGSKTTGIALVRKDGNAAHAVTLLELEHRADHISKLLYRRRLLRHARRARHGRYRNPRRHYSHRLAPSIRHRLLTTETWVRRLMAWAPVSGLAFEQVAFGLRAGQRDHEPGLSLRERLMSAWGGRCAYCGGPGPFQIDHVRAKAKHGGDHIGNRVLACVSCNKAKGALRLSEFVSGDRREDIKSTLTPARRDEAAVNIARNALGEMLAATGLPVEATNTRHTKMNRRRLGLHKGDALDALVLGQDLGVVTGAGQPVLHIQAMGRGSHQRTRVDAAGFPTSYLMRTKRVHGFATGDLVRARVGRGEMAGVHVGRVAVRANGNFNVVADAGVLRVSWKFCDLLQKGDGYRYGW

SEQ ID NO: 24809 - protein, 478 aa, unidentified; identical to SEQ ID NO: 24531
  REGION 1..478: note = Human gut metagenome

SEQ ID NO: 24810 - protein, 453 aa, Moorena sp.; identical to SEQ ID NO: 24539

SEQ ID NO: 24811 - protein, 460 aa, unidentified; identical to SEQ ID NO: 24549
  REGION 1..460: note = Human gut metagenome

SEQ ID NO: 24812 - protein, 478 aa, unidentified
  REGION 1..478: note = Human gut metagenome
MTGNCTRSVKGKNKMPVCVLSANGERLMPTENYGKVRHLLKDGRAVIAKRNPFTIQLTYDTSTYTQPIEMCVGTGYEHIGVSIKTKAKEVVSQQYDMLTNERSRHDDCRAYRRTRRNRLRHRAARFNNRVSGKKPGWIAPSLDNKVERHLDIISRYLSVMPVTDVFIKAATYDTQLLAALEAGEPVPQGKDYQHGPQYGYDTLREAVFERDHYTCVYCKRGLKDGAILHVHHAYYWKGLHGNSMRELATCCEKCNTPANHKDGGKLWGFDKPLRKYTGEAFMNSVRWILYQRAMARFQGVAEVHMTYGVISKRVRTNLGLPYSCATDAYCMGELRPEARCETEVFQKYRRNNRVLSKFYDAKYYDTREKGVIRSGNELSSGRTNRNHNLDGENLRRFRGCKKSKGRTSTRKQRYAMQPGDIVVYGNRKYVSKGCSSYGRALSLLTDGKPLMVSMKKIQLVRHKGGWVRLPHAAAEAKK

SEQ ID NO: 24813 - protein, 464 aa, unidentified
  REGION 1..464: note = gut metagenome
MPVCVLSANGERLMPTENYGKVRHLLKDGRAVIAKRNPFTIQLTYETSTYTQPIELCVGTGYEHIGVSIKTKAKEVVSQQYDLLTNERSRHDDCRAYRRTRRNRLRYRAARFNNRVSGKKPGWIAPSLDNKVERHLDIISRYLSVMPVTDVFIKAATYDTQLLAALEAGEPVPQGKDYQHGPQYGFDTLREAVFERDHYTCVYCKRGLKDGAILHVHHAYYWKGLHGNSMRELATCCEKCNTPANHKEGGKLWGFDKPLRKYTGEAFMNSVRWILYQRATARFQGAAEVHMTYGVISKRVRTNLGLPYSCATDAYCMGELRPEARCETEVFQKYRRNNRVLSKFYDAKYYDTREKGVIRSGNELSSGRTNRNHNLDGENLRRFRGCKKSKGRTSTRKQRYAMQPGDIVVYGNRKYASKGCSSYGRALSLLTDGKPLVVSMKKIQLVRHKGGWVRLPQAAAGAKE

SEQ ID NO: 24814 - protein, 501 aa, unidentified; identical to SEQ ID NO: 24556
  REGION 1..501: note = Human gut metagenome

SEQ ID NO: 24815 - protein, 435 aa, Moorena sp.; identical to SEQ ID NO: 24572

SEQ ID NO: 24816 - protein, 464 aa, unidentified; identical to SEQ ID NO: 24601
  REGION 1..464: note = Human gut metagenome

SEQ ID NO: 24817 - protein, 433 aa, unidentified; identical to SEQ ID NO: 24682
  REGION 1..433: note = Human gut metagenome

SEQ ID NO: 24818 - protein, 478 aa, unidentified
  REGION 1..478: note = Human gut metagenome
MTGNCTRSVKGKNKMPVCVLSANGERLMPTENYGKVRHLLKDGRAVIAKRNPFTIQLTYDTSTYTQPIEMCVGTGYEHIGVSIKTKAKEVVSQQYDMLTNERSRHDDCRAYRRTRRNRLRYRAARFNNRVSGKKPGWIAPSLDNKVERHLDIISRYLSVMPVTDVFIKAATYDTQLLAALEAGEPVPQGKDYQHGPQYGYDTLREAVFERDHYTCVYCKRGLKDGAILHVHHAYYWKGLHGNSMRELATCCEKCNTPANHKEGGKLWGFDKPLRKYTGEAFMNSVRWILYQRAMARFQGVAEVHMTYGVISKRVRTNLGLPYSCATDAYCMGELRPEARCETEVFQKCRRNNRVLSKFYDAKYYDTREKGVIRSGNELSSGRTNRNHNLDGENLRRFRGCKKSKGRTSTRKQRYALQPGDIVVYGNRKYVSKGCSSYGRALSLLTDGKPLVVSMKKIQLVRHKGGWVRLPQAAAEAKK

SEQ ID NO: 24819 - protein, 430 aa, Streptomyces sp.
  SITE 430: note = misc_feature - Xaa can be any naturally occurring amino acid
VFVLDKHGTPLQPTTPARARKLLASGRAVVARHTPFVIRLKDRTANHSQVDGVEIGIDPGSKHTGIAVFTTVTGERRGRYSIQLDHRGAAIRKKLERRAAYRRGRRTRNLRYRAPRFLNRTRPKGWLPPSLRHRVDTTTSWVDRLARWAPVKAVHVERVAFDTNAISAGRPLEGAEYQHGTLHGTEVREYLLAKFGRACVYCGAMGVPLNIDHIRPRSRGGSDRVANLTLACIPCNQAKSSRPVEEFAPKRAAEILKRAKAPLRDAAAVNATTWALWRPWTHACPPAPRPAGAPSGTAPGAPCPTPTPWTPSPSANSTPSPPGPAPSWSSGRPDAASTSAPAPTSTASPAYACPASSSSSATPPATSSGPSSPRGRTRAPTPAASPSAPPGTSPSEPQAASTPPGTSTSASSSEPTATPTPANPKEPRLX

SEQ ID NO: 24820 - protein, 454 aa, Lactobacillus sp.; identical to SEQ ID NO: 24536

SEQ ID NO: 24821 - protein, 452 aa, Lactobacillus sp.; identical to SEQ ID NO: 24570

SEQ ID NO: 24822 - protein, 478 aa, unidentified; identical to SEQ ID NO: 24531
  REGION 1..478: note = Human gut metagenome

SEQ ID NO: 24823 - protein, 442 aa, Symploca sp.
MKVCVVNIGERPLMPTTPRKAKILLREGAAKIFRRDPFTIQLLSDCHGYIQPATLGIDAGYLNIGYSALNQTAELIGGEVKMLEGMSQRISEKLKYRRTRRNRLRYRAPRFNNRRRNNGWLTPSIEHKLDTHHRLIDRIKSVLPIETVVIEVANFDIQKIKNPEISGNGYQQGEQNGFDNLREYLLHRDGHKCQHPECKNKSKQPNLQVHHLGFWKNPPDRTDRPGNLITLCNKCHTPAQHKKKGKLFGWEPKIKPFKPETFMSTVRWRLAKDTGYKATFGYITKAKRRILKLDKSHHNDAFVIAGGEYQTRCEALNLVQIRGNKRSMEQFYDAKYLDIRDKVPKSGTELFSGRRTRNNNLNSENLRVYRGHKLSKGQRRVKKLRYRYQPHDEVEFEGAVFEVVGMQNKGTGVKLKDYPGIKNKVVKISAVKSVKKRGGICA

SEQ ID NO: 24824 - protein, 464 aa, unidentified
  REGION 1..464: note = Human gut metagenome
MPVCVLSANGERLMPTENYGKVRHLLKDGRAVIAKRNPFTIQLTYETSTYTQPIELCVGTGYEHIGVSIKAKAKEVVSQQYDLLTNERSRHDDCRAYRRTRRNRLRYRAARFNNRVSSKMPGWIAPSLDNKVERHLDIISRYLSVMPVKDVFIKAATYDTQLLAALEAGEPVPQGKDYQHGPQYGYDTLREAVFERDHYTCVYCKRGLKDGAILHVHHAYYWKGLHGNSMRELATCCEKCNTPANHKEGGKLWGFDKPLRKYTGEAFMNSVRWILYQRAMARFQGVAEVHMTYGVISKRVRTNLGLPYSCATDAYCMGELRPEARCETEVFQKYRRNNRVLSKFYDAKYYDTREKGVIRSGNELSSGRTNRNHNLDGENLRRFRGCKKSKGRTSTRKQRYAMQPGDIVVYGNHKYVSKGCSSYGRALSLLTDGKPLMVSMKKIQLVRHKGGWVRLPHAAAEAKK

SEQ ID NO: 24825 - protein, 433 aa, unidentified
  REGION 1..433: note = Human gut metagenome
MQSHIRAFVLDKDRKPLMPCHAAKARKLLKKGKAAVFRRFPFTIILKERTREASAIQDVLVKVDPGSKSTGLAVVRKDEKNVHHALAFICLNHRGSKIRDALTSRRQLRRGRRSRNLRYRAPRFLNRKKPKGWLAPSLQHRVDAVMSWMNRLTRLVPVAGFVQELVKFDTQLMQNAAISGVEYQQGELAGYELKEYLLEKFDRKCVYCGKSGVVLNVEHIIPKARGGSNRVSNLAIACAQCNQKKGAMPIEDFLKKKPALLAQIRKQLKTPLRDAAAVNATRWALYRNLQATGCTVEIGSGALTKFNRHAFSVPKEHWLDALCAGRIDGVADWENLRPLQAYCIGRGSHKRTRTDKYGFPLCYFSRYKRPNDFGTGDYVRVKVTRGRNTGIWIGRATLTDGKLSVETKAGRVKATFLNSKCLFKSDGYKYQYL

SEQ ID NO: 24826 - protein, 464 aa, unidentified; identical to SEQ ID NO: 24705
  REGION 1..464: note = Human gut metagenome

SEQ ID NO: 24827 - protein, 416 aa, unidentified
  REGION 1..416: note = IscB polypeptide
VVLGPKGSKTKEILKLVYVVNKNGNPLMPCKEAKARHLLKSGKARVLLRCPFTICLNWECEEGVQEVVASLITSSSEVGVAVKRDSGECLYAAEIELRQNVTRATVQIVKGKKKKVSRRMQYRRPRRNRKTRYRQCRNRNRTGNYRQKYSPTLRSKIEGHEREVRRVEKLLPVTRWLVVRGAKVEGHFKDGSLEEQWLNVQRQVFERDGFRCRHCKKGKRELHAHHLEARKDGGLDTLENLVTLCKECHGDYHRGLISLKIGKHTYKGKVDTEVAIIRKNLVVEKSEDVYGFQVKAKRNALELSYSPLNDACAALNVKPSTNVYGIRCIPRGDYQRTRGRHSQQVVPKGKIMGFNRFDKVRYLGKALFIKMRMSTGYFKLTDINNKDIPKVILGRKLKLLGRRRSCLIALTTPTSP

SEQ ID NO: 24828 - protein, 464 aa, unidentified; identical to SEQ ID NO: 24525
  REGION 1..464: note = Human gut metagenome

SEQ ID NO: 24829 - protein, 439 aa, Symploca sp.
MRICVVNIGERPLMPTTPRKAKILLREGAAKIFKRDPFTIQLLSDCHGYIQSATLGIDAGYLNIGYSAINQTAELIGGEVKMLKGVSQRITEKLKYRRTRRNRLRHRAPRFDNRRRSNNWLTPSIQHKLDTHHRLIDRIKSVLPIDQVVIEVANFDIQKIKNPEISGSGYQQGEQNGFDNLREYLLHRDGHKCQHRECKNKSKQPILQVHHLGFWKNPPDRTDRPGNLITLCNLCHTPAQHKKKGKLFGWEPKIKPFKPETFMSTVRWKLTKDTCYKATFGYITKAKRRILKLGKSHHNDAFVIAGGEYQTRCEALNLVQIRRNKRSMEQFYDAKYLDTRDKKPKSGTELFSGRRTRNKNLNSENLRAHRGHKVSKGKRAIKTKRYPYRQGDIVLWNGKVFTVRGVHCKGTRAILHETGKSVALRQIESLKKTGGLCAI

SEQ ID NO: 24830 - protein, 477 aa, unidentified; identical to SEQ ID NO: 24573
  REGION 1..477: note = Human gut metagenome

SEQ ID NO: 24831 - protein, 478 aa, unidentified; identical to SEQ ID NO: 24531
  REGION 1..478: note = Human gut metagenome

SEQ ID NO: 24832 - protein, 478 aa, unidentified; identical to SEQ ID NO: 24531
  REGION 1..478: note = Human gut metagenome

SEQ ID NO: 24833 - protein, 470 aa, Microcoleus sp.
VKTLAKETTFLGMKTCLLGLTIMKVYVINRKGRPLMPTTPRKARLLLKSGKAKIVRRTPFSIQLIYGSSGYTQPVNLGIDAGYENIGFSAVNENRELIGGELKMLKGISERITERRKYRRTRRNRLRHRKPRFSNRRIEKGWLAPSIQHKLDTHHRLIQKICRTLPVRTVTIEVAALDIQKIKNPTIVGEQYQYGEQYGFDNLREYILHRDGHKCQNPNCNNKTDKPILQVHHLGFWKNPPDRTDRPANLITLCTKCHTPKNHQKKGFLFGWQPKLKSFKGETFMTMVRWRLTEQGRYESTFGYITKGKRRELEIEKSHHNDAFVIAGGTTQTRVVKPLMLEQIRRNKRSLEQFYDAKYRDIRDGEIRSGGELSSGRRTRNTNLNGENLRQHRAHKVSTGRRAIKRKRYPYKQRDLVLFEGKAYEVIGMQNLGTRLSLKPDTNSKTKYKTAALSKVKPLKRRGGICEQQT

SEQ ID NO: 24834 - protein, 478 aa, unidentified; identical to SEQ ID NO: 24659
  REGION 1..478: note = Human gut metagenome

SEQ ID NO: 24835 - protein, 470 aa, unidentified
  REGION 1..470: note = Human gut metagenome
VKGKNKMPVCVLSANGERLMPTENYGKVRHLLKDGRAVIAKRNPFTIQLTYDTSTYTQPIELCVGTGYEHIGVSIKTKAKEVVSQQYDLLTNERSRHDDCRAYRRTRRNHLRYRAARFNNRVSGKKPGWIAPSLDNKVERHLDIISRYLSVMPVTDVFIKAATYDTQLLAALEAGEPVPQGKDYQHGPQYGYDTLREAVFERDHYTCVYCKRGLKDGAILHVHHAYYWKGLHGNSMRELATCCEKCNTPANHKEGGKLWGFDKPLRKYTGEAFMNSVRWILYQRAMARFQGAAEVHMTYGVISKRVRTDLGLPYSCATDAYCMGELRPEARCETEAFQKYRRNNRVLSKFYDAKYYDTREKGVIRSGNELSSGRTNRNHNLDGENLRRFRGCKKSKGRTSTRKQRYAMQPGDIVVYGNRKYVSKGCSSYGRALSLLTDGKPLMVSMKKIQLVRHKGGWVRLPQAAAEAKK

SEQ ID NO: 24836 - protein, 478 aa, unidentified; identical to SEQ ID NO: 24701
  REGION 1..478: note = Human gut metagenome

SEQ ID NO: 24837 - protein, 478 aa, unidentified
  REGION 1..478: note = Human gut metagenome
MTGNCTRSVKGKNKMPVCVLSANGERLMPTENYGKVRHLLKDGRAVIAKRNPFTIQLTYDTSTYTQPIEMCVGTGYEHIGVSIKTKAKEVVSQQYDMLTNERSRHDDCRAYRRTRRNRLRYRAARFNNRVSGKKPGWIAPSLDNKVERHLDIISRYLSVMPVTDVFIKAATYDTQLLAALEAGEPVPQGKDYQHGPQYGYDTLREAVFERDHYTCVYCKRGLKDGAILHVHHAYYWKGLHGNSMRELATCCEKCNTPANHKEGGKLWGFDKPLRKYTGEAFMNSVRWILYQRAMARFQGVAEVHMTYGVISKRVRTNLGLPYSCATDAYCMGELRPEARCETEVFQKYRRNNRVLSKFYDAKYYDTREKGVIRSGNELSSGRTNRNHNLDGKNLRRFRGCKKSKGRTSTRKQRYAMQPGDIVVYGNRKYVSKGCSSYGRALSLLTDGKPLMVSMKKIQLVRHKGGWVRLPHAAAEAKK

SEQ ID NO: 24838 - protein, 464 aa, unidentified; identical to SEQ ID NO: 24824
  REGION 1..464: note = Human gut metagenome

SEQ ID NO: 24839 - protein, 478 aa, unidentified; identical to SEQ ID NO: 24531
  REGION 1..478: note = Human gut metagenome

SEQ ID NO: 24840 - protein, 478 aa, unidentified; identical to SEQ ID NO: 24531
  REGION 1..478: note = Human gut metagenome

SEQ ID NO: 24841 - protein, 425 aa, Moorena sp.
MTDKVYVQDKDGQPLMPTKPARARRKLDQGKAEVVQRDPFTIRLTYEVDGEKNTEEIRIGLDEGSKKGGASAVQNGGEVLYQSEVQLRTDIRSKMDRRRRYRRSRRSRKTRYRKPKFDNRRREEGWLPPSLKSKAESMVKAVKDISEILPIEGVNVEIAPFDMQKVKDPDIEGEEYQNGELKGHTSARQYVLYRDKHQCINCKKDDVPLQTHHIQPKREGGTDKPSNMVSLCVECHEGVHSGEVELSERSLKYWTNKEYKYASHVNSMKDYIVDELKKLFDDVKVTFGNITKAVRKKLGLGKSDVNDSIAVASQDFIDKDSVSTLGYTFVKKCLPRGRYRLHKGEGSEVSIPTDDSDYFGFNRWDKVELPDGTVGFVKGRRKSGYFDISDIDGNSYDHSIRYSKLELISRADTIITEVRGNSSPQ

SEQ ID NO: 24842 - protein, 478 aa, unidentified
  REGION 1..478: note = Human gut metagenome
MTGNCTRSVKGKNKMPVCVLSANGERLMPTENYGKVRHLLKDGRAVIAKRNPFTIQLTYDTSTYTQPIEMFVGTGYEHIGVSIKTKAKEVVSQQYDMLTNERSRHDDCRAYRRTRRNRLRYRAARFNNRVSGKKPGWIAPSLDNKVERHLDIISRYLSVMPVTDVFIKAATYDTQLLAALEAGEPVPQGKDYQHGPQYGYDTLREAVFERDHYTCVYCKRGLKDGAILHVHHAYYWKGLHGNSMRELATCCEKCNTPANHKEGGKLWGFDKPLRKYTGEAFMNSVRWILYQRAMARFQGVAEVHMTYGVISKRVRTNLGLPYSCATDAYCMGELRPEARCETEVFQKYRRNNRVLSKFYDAKYYDTREKGVIRSGNELSSGRTNRNHNLDGENLRRFRGCKKSKGRTSTRKQRYAMQPGDIVVYGNRKYVSKGCSSYGRALSLLTDGKPLMVSMKKIQLVRHKGGWVRLPHAAAEAKK

SEQ ID NO: 24843 - protein, 422 aa, unidentified
  REGION 1..422: note = Bioreactor metagenome
MVYVIDIQGRPLMPTERHRKVRRLLRDGLARVVTRTPFTIQLLYETTPFVQPVTLGLDPGSKVAGLSASTKDRELIRVEASLRTDIVGLLSTRRELRRTRRSRMLRHRKARFDNRKKPDNLMAPSIEQRIDSHMKLVNKACSILPVSRIIVETAQFDMQLIKNPDISGTDYQHGEQEGWKNVREYVLWRDGHSCRSCGGKSKDFVLEVHHLESRKTGGNSPDNLVTLCKACHEGYHRGDIQLKLKHAPSLRDAVAVNIFRWEIYNRLVKAYGKDKVGLIYGYKTKDRRISLSLPKTSETDAFCIAGNLDASRCDLIKAKFVARHCRSLHRQVTEKGGKRRGTVTSHWIGKSYLQRFDTVKYQGKECIISGSTNGRPILRNIDWTKATDSPSVNPKQVKFLSRKHDSIIYKTFTNKQIITCET

SEQ ID NO: 24844 - protein, 417 aa, unidentified; identical to SEQ ID NO: 24686
  REGION 1..417: note = Human gut metagenome

SEQ ID NO: 24845 - protein, 417 aa, unidentified; identical to SEQ ID NO: 24686
  REGION 1..417: note = metagenome

SEQ ID NO: 24846 - protein, 478 aa, unidentified
  REGION 1..478: note = Human gut metagenome
MTGNCTRSVKGKNKMPVCVLSANGERLMPTENYGKVRHLLKDGRAVIAKRNPFTIQLTYDTSTYTQPIEMCVGTGYEHIGVSIKTKAKEVVSQQYDMLTNERSRHDDCRAYRRTRRNRLRYRAARFNNRVSGKKPGWIAPSLDNKVERHLDIISRYLSVMPVTDVFIKAATYDTQLLAALEAGEPVPQGKDYQHGPQYGYDTLREAVFERDHYTCVYCKRGLKDGAILHVHHAYYWKGLHGNSMRELATCCEKCNTPANHKEGGKLWGFDKPLRKYTGEAFMNSVRWILYQRAMARFQGVAEVHMTYGVFSKRVRTNLGLPYSCATDAYCMGELRPEARCETEVFQKYRRNNRVLSKFYDAKYYDTREKGVIRSGNELSSGRTNRNHNLDGENLRRFRGCKKSKGRTSTRKQRYAMQPGDIVVYGNRKYVSKGCSSYGRALSLLTDGKPLMVSMKKIQLVRHKGGWVRLPHAAAEVKK

SEQ ID NO: 24847 - protein, 478 aa, unidentified
  REGION 1..478: note = Human gut metagenome
MTGNCTRSVKGKNKMPVCVLSANGERLMPTENYGKVRHLLKDGRAVIAKRNPFTIQLTYDTSTYTQPIEMCVGTGYEHIGVSIKTKAKEVVSQQYDMLTNERSRHDDCRAYRRTRRNRLRYRAARFNNRVSGKKPGWIAPSLDNKVERHLDIISRYLSVMPVTDVFIKAATYDTQLLAALEAGEPVPQGKDYQHGPQYGYDTLREAVFERDHYTCVYCKRGLKDGAILHVHHAYYWKGLHGNSMRELATCCEKCNTPANHKEGGKLWGFDKPLRKYTGEAFMNSVRWILYQRAMARFQGVAEVHMTYGVISKRVRTNLGLPYSCATDAYCMGELRPEARCETEVFQKYRRNNRVLSKFYDAKYYDTREKGVIRSGNELSSGRTNRNHNLDGENLRRFRGCKKSKGRTSTRKQRYAMQPGDIVVYGNRKYVSKGCSSYGRALSLLTDGKPLMVSMKKIQLVRHKGGWVRLTHAAAEAKK

SEQ ID NO: 24848 - protein, 478 aa, unidentified; identical to SEQ ID NO: 24701
  REGION 1..478: note = Human gut metagenome

SEQ ID NO: 24849 - protein, 443 aa, Sutterella sp.; identical to SEQ ID NO: 24617

SEQ ID NO: 24850 - protein, 478 aa, unidentified; identical to SEQ ID NO: 24701
  REGION 1..478: note = Human gut metagenome

SEQ ID NO: 24851 - protein, 443 aa, Scytonema sp.; identical to SEQ ID NO: 24526

SEQ ID NO: 24852 - protein, 417 aa, unidentified; identical to SEQ ID NO: 24686
  REGION 1..417: note = Human gut metagenome

SEQ ID NO: 24853 - protein, 443 aa, unidentified; identical to SEQ ID NO: 24617
  REGION 1..443: note = Human gut metagenome

SEQ ID NO: 24854 - protein, 433 aa, unidentified
  REGION 1..433: note = metagenome
MQPHIRAFVLDKDRKPLMPCHAARARKLLKKGKAAVFRRFPFTIILKERTREASAVQDVLVKIDPGSKSTGIAVVRKDKKDVHHALAFICLNHRGSKIRDALTSRRQLRRGRWSRNLRYRAPRFLNRTKPQGSLAPSLRHRVDTVMSWMNRLTRLVPVTGFVQELVKFDTQLMQNAAISGVEYQQGELAGYELKEYLLEKFDRKCVYCGKSGVVLNVEHIIPKARGGSNRVSNLAIACVQCNQKKGAMPIEDFLKKKPALLAQIRKQLKTTLRDAAAVNATRWSLFRSLQSTGCTVEVGSGAQTKFNRHAFSVPKEHWLDALCTGRIDGVADWEKLRPLQAYCIGRGSHKRTRTDKYGFPLCYFSRRKRPNDFGTGDYVRVKVTRGRNAGIWTGRATLTDGKLSVETKAGRVKATFLNSKCLFKSDGYKYQYL

SEQ ID NO: 24855 - protein, 452 aa, Lactobacillus sp.; identical to SEQ ID NO: 24570

SEQ ID NO: 24856 - protein, 478 aa, unidentified; identical to SEQ ID NO: 24591
  REGION 1..478: note = Human gut metagenome

SEQ ID NO: 24857 - protein, 455 aa, unidentified
  REGION 1..455: note = Bioreactor metagenome
VEPCDQAAQIGLDALFVCTPHSNDDGHRKGQNQDCVSVRKGCHHMSVFVLDQHGHPIMPCSEKRARQMLERGRARVHRVMPFTIRLVDRLVEGSALQPLQEKIDPGSKTTGIALVRKDGNAAHAVTLLELEHRADHISKLLYRRRLLRHARRARHGRYRNPRRHYSHRLAPSIRHRLLTTETWVRRLMAWAPVSGLAFEQVAFGLRAGQRDHEPGLSLRERLMSAWGGRCAYCGGPGPFQIDHVRAKAKHGGDHIGNRVLACVSCNKAKGALRLSEFVSGDRREDIKSTLTPARRDEAAVNIARNALGEMLAATGLPVEATNTRHTKMNRRRLGLHKGDALDALVLGQDLGVVTGAGQPVLHIQAMGRGSHQRTRVDAAGFPTSYLMRTKRVHGFATGDLVRARVGRGEMAGVHVGRVAVRANGNFNVVADAGVLRVSWKFCDLLQKGDGYRYGW

SEQ ID NO: 24858 - protein, 478 aa, unidentified; identical to SEQ ID NO: 24701
  REGION 1..478: note = Human gut metagenome

SEQ ID NO: 24859 - protein, 464 aa, unidentified
  REGION 1..464: note = Human gut metagenome
MMPTQKQKQVNYVYVVDANGTPVMPTSRLGMVRRWLKSGQAVWYGNSRTTIQFVRPIDTQTQPLTLGVNTGFHLGMAVVGNDREYYASESIRKSEKDRITARREYRRTRRNRLRYRKPRFDNRRRKAGWLAPSVQHRLEFTVREIQRLYRFLPISQLVVEVSPFDNQKLANPAIKPWEYTQGKMHGYQTVKDYLLVRDHNRDALDGQVYPASQLRVHHLVQHKDGGTNQPDNLVLLSDVHHNQANHVNGTLTKLAANRQRTIDYRGVYFMSLLASRLNHYFPNYVQTQGYLTANLRFRYGITKSHLNDAFVIAGGTDQYTRTGNVYRREKLRCNNRSLQKFYDAKYIDRRDDKKKAGKELSSGRTKRSRELNYDNQRIYRLRKVSKGRISIRRQHYRLRPHDIVFNMKIKQTEFVKGVISNGKSVLLQNGHTVTPQKLVCLHHVNGILTVKVPLVLDDGLISHD

SEQ ID NO: 24860 - protein, 453 aa, Janthinobacterium sp.
MGIFVLDKKSRPLMPCSEKRARKLLDCRRARVHLLFPFSIGLVDRLLEDGVLQPLRLSDDPGSVTSGLAVCRIEEGDVNDMSDAAGINAPVMHILCLMELVHRGPAIKKSLHARSSMRRRRRGNLRYRAPRFNNRTRRKVWLAPSLQRRIDTTMSWAARRRRLAPITHLAQERVHFDMRKMENPEICGVRYQQGTLLGYEMREYLLDKFNRSCADCDATGVPLQMAHIDAEADGGSNRVSDLTLACDPCNKNARDIREFQKKDPVRLAKILAKAKAPLRDAAAVNATRWTRFEALKKTGLPAETGGGHTNWSRSRLGLPKTRAHNAACVGIVGGIGGTRAPTLRVKCTGCGSRCKTRLNQYGFRRADLPSGKGIHKGRVALRMTGNFNIQTGIAHALTVRGFSQKHCSVIQRADGYGYVWQKAIQLSNLRAPSASRSAPALPAVNAGVSRSNI

SEQ ID NO: 24861 - protein, 464 aa, unidentified; identical to SEQ ID NO: 24525
  REGION 1..464: note = Human gut metagenome

SEQ ID NO: 24862 - protein, 443 aa, unidentified
  REGION 1..443: note = Human gut metagenome
MMKVFVLDKDHKPLMPCGPARARKLLKAGRARVHKLQPFTIRIVDRSLADSVVQKVVVKVDPGSKETGIAVVREDEEETHHALYFINLKHRGAAIRDALTSRRQLRRGRRSRNLRYRAPRFLNRSKPKGWLPPSLQHRVDTTLSWVNRLRRLAPVSGIAQELVKFDTQRMQNPEISGVEYQQGELAGYELKEYLLEKFGRRCVYCAKSDVPLNVEHIVPKARGGSNRLSNLAIACVECNQKKGAKPIEEFLKGKPELLARVRKQLKTPLRDAASVNATRWALFHALSATGLPVRTGSGALTKYNRHCFGVPKEHWFDALCVGRINGVSYDSCMKVLNVSCTGRGQYKRTRTDKFGFPICHFMRTKRPHGVGLGDLVRMTVQKGKHPGIWTGRAFPSNDGRVVLILPEFRIWGRARNCSILSLSDGYGYRLTDSETTKPTSFGK

SEQ ID NO: 24863 - protein, 392 aa, Alicyclobacillus sp.
MKQNRVLVLDTNRRPLMPCHPARARQLLKAGRASVFRRYPFTIILHDRDGGDIQPTQLKLAPGSKTTGVALVADFQRGKTVVWAAEIQHRGDQIRQALLRRRMLRRGRRYRKTRYRKPRFDNRRRPEGWLPPSLMSRVHNIETWVTRLRRWAPITHLSIQLVSFDTQKLQYPEISGVEYQQGTPYGYEVREYLLEKWGRKCAYCGAENVPLEIDHVIPRSRGGSDRVSNLVLACHRCNQAKANRSVEEFLAHDEERLHRIQAQLKLSLRDAAAVNTTRWAVFRRLKDTGLPVEAGSGGRTKYNRFSQGYPKAKWIDAACVGESGQYVGLDTQMQVLTIVAKGHGKRQRCITDKYGFPRSHAPSSRTYMGSAQAIWYRRISREGSTPGHMSGA

SEQ ID NO: 24864 - protein, 478 aa, unidentified; identical to SEQ ID NO: 24531
  REGION 1..478: note = Human gut metagenome

SEQ ID NO: 24865 - protein, 478 aa, unidentified; identical to SEQ ID NO: 24531
  REGION 1..478: note = Human gut metagenome

SEQ ID NO: 24866 - protein, 443 aa, unidentified
  REGION 1..443: note = Human gut metagenome
MMKVFVLDKDHKPLMPCGPARARKLLKAGRARVHKLQPFTIRIVDRSLADSVVQKVVVKVDPGSKETGIAVVREDEEETHHALYFINLKHRGAAIRDALTSRRQLRRGRRSRNLRYRAPRFLNRSKPKGWLPPSLQHRVDTTLSWVNRLRRLAPVSGIAQELVKFDTQRMQNPEISGVEYQQGELAGYELKEYLLEKFGRRCVYCAKSGVPLNVEHIVPKARGGSNRLSNLAIACVECNQKKGAKPIEEFLKGKPELLARVRKQLKTPLRDAASVNATRWALFHALSATGLPVRTGSGALTKYNRHCFGVPKEHWFDALCVGRINGVSYDSCMKVLNVSCTGRGQYKRTRTDKFGFPICHFMRTKRPHGVGLGDLVRMTVQKGKHPGIWTGRAFPSNDGSVVLILPEFRIKGRARNCSILSLSDGYGYCLTDSETAKPTSFGK

SEQ ID NO: 24867 - protein, 478 aa, unidentified; identical to SEQ ID NO: 24531
  REGION 1..478: note = Human gut metagenome

SEQ ID NO: 24868 - protein, 464 aa, unidentified; identical to SEQ ID NO: 24824
  REGION 1..464: note = Human gut metagenome

SEQ ID NO: 24869 - protein, 478 aa, unidentified; identical to SEQ ID NO: 24531
  REGION 1..478: note = Human gut metagenome

SEQ ID NO: 24870 - protein, 452 aa, Moorena sp.; identical to SEQ ID NO: 24570

SEQ ID NO: 24871 - protein, 454 aa, Lactobacillus sp.; identical to SEQ ID NO: 24536

SEQ ID NO: 24872 - protein, 500 aa, unidentified; identical to SEQ ID NO: 24543
  REGION 1..500: note = Human gut metagenome

SEQ ID NO: 24873 - protein, 478 aa, unidentified; identical to SEQ ID NO: 24842
  REGION 1..478: note = Human gut metagenome

SEQ ID NO: 24874 - protein, 431 aa, Moorena sp.
MYIYVQAQDGTPLMPTSRCGKLRRMLRDGKAVIVSHTPFTVRLTYDTTHHTQPVSLGVDSGSKYIGISATTNSKELYAAQIELRTDIVDNLSTRRESRRTRRSKRSIRYRAPRFNNRRASKRAGWLAPSVRQKVHSHTKAVQDICRILPVTSVTVEVAQFDTQWLKNPDITGTDYQHGPQLGFWNLREYVLFRDNHQCQHCHGKSKDSILNVHHLESRKTGGDSPDNLITLCESCHKAFHRGEFELKTKRSSQPLRDAAAMSIMRWRVYNELKESLGVPVHLTYGYYTKHLRIENGLEKTHAIDARCISGHPSVIPADDVFHYRQLRKHNRKVMKSNMLSGGRWKRNQAPCQIKDFRRFDIVTYKNTQCYINSLRTRGYFSIKSFDNKVISNDMSYKSLGLVRHSGRSLFHKERGLKTRFPAPSKDGSTLA

SEQ ID NO: 24875 - protein, 453 aa, Moorena sp.; identical to SEQ ID NO: 24539

SEQ ID NO: 24876 - protein, 460 aa, unidentified
  REGION 1..460: note = Human gut metagenome
LARGTLRQRSILWNRLLPDSRTGKDFFMQPHIRAFVLDKDRKPLMPCHAARARKLLKKGKAAVFRRFPFTIILKERTREASAVQDVLVKIDPGSKSTGIAVVRKDKKDVHHALAFICLNHRGSKIRDALTSRRQLRRGRRSRNLRYRAPRFLNRTKPQGSLAPSLRHRVDTVMSWMNRLTRLVPVTGFVQELVKFDTQLMQNAAISGVEYQQGELAGYELKEYLLEKFDRKCVYCGKSGVVLNVEHIIPKARGGSNRVSNLAIACVQCNQKKGAMPIEDFLKKKPALLAQIRKQLKTTLRDAAAVNATRWSLFRSLQSTGCTVEVGSGAQTKFNRHAFSVPKEHWLDALCTGRIDGVADWEKLRPLQAYCIGRGSHKRTRTDKYGFPLCYFSRRKRPNDFGTGDYVRVKVTRGRNAGIWTGRATLTDGKLSVETKAGRVKATFLNSKCLFKSDGYKYQYL

SEQ ID NO: 24877 - protein, 430 aa, Streptomyces sp.; identical to SEQ ID NO: 24819
  SITE 430: note = misc_feature - Xaa can be any naturally occurring amino acid

SEQ ID NO: 24878 - protein, 464 aa, unidentified; identical to SEQ ID NO: 24793
  REGION 1..464: note = gut metagenome

SEQ ID NO: 24879 - protein, 478 aa, unidentified; identical to SEQ ID NO: 24703
  REGION 1..478: note = Human gut metagenome

SEQ ID NO: 24880 - protein, 478 aa, unidentified
  REGION 1..478: note = Human gut metagenome
MTGNCTRSVKGKNKMPVCVLSANGERLMPTENYGKVRHLLKDGRAVIAKRNPFTIQLTYDTSTYTQPIEMCVGTGYEHIGVSIKTKAKEVVSQQYDMLTNERSRHDDCRAYRRTRRNRLRYRAARFNNRVSGKKPGWIAPSLDNKVERHLDIISRYLSVMPVTDVFIKAATYDTQLLAALEAGEPVPQGKDYQHGPQYGYDTLREAVFERDHYTCVYCKRGLKDGAILHVHHAYYWKGLHGNSMRELATCCEKCNTPANHKEGGKLWGFDKPLRKYTGEAFMNSVRWILYQRAMAHFQGVAEVHMTYGVISKRVRTNLGLPYSCATDAYCMGELRPEARCETEVFQKYRRNNRVLSKFYDAKYYDTREKGVIRSGNELSSGRTNRNHNLDGENLRRFRGCKKSKGRTSTRKQRYAMQPGDIVVYGNRKYVSKGCSSYGRALSLLTDGKPLMVSMKKIQLVRHKGGWVRLPHAAAEAKK

SEQ ID NO: 24881 - protein, 457 aa, unidentified
  REGION 1..457: note = IscB polypeptide
MQRVFVVDTNLRPLGPCQPGRARLLLCNGKAAVWRQYPFTIILKHEVEGAVPETELRIKPVSKITGIALIGKFQRGDVVACADDIHHRGKAIRKALTSRSAIRRGRRNRNTRYRQPRFKNRTRSKGWLPPSIQSRVYNVETWVKKIVRLAPVGSIAIETSSFDTQKLQNPEISGVEYQQGTLAGYEVKEYLLEKWGRKCAYCEKKDVPLQLDHIKPRSPKYGAGGSDRISNLTLACPDCNQKKGNLPVEVFLADRPDVLRQIRAQVKAPLRDAAAINATRYAIGRVIKALGLPTSFWSGGRTKFNRTSQGYPKAHWIDAACVGENGGNVIIPPAMTPLCVKACGHGSRQMCSVDRFGFPRSKAKGARVVKGFRTGDIVQAIVPTGKKAGKHTGRVSIRSRGYFNINAATGTVTDISYKHCAVLHRADGYNYQITEKETALLPMAEARGPRAAIAWWE

SEQ ID NO: 24882 - protein, 478 aa, unidentified; identical to SEQ ID NO: 24531
  REGION 1..478: note = Human gut metagenome

SEQ ID NO: 24883 - protein, 478 aa, unidentified; identical to SEQ ID NO: 24701
  REGION 1..478: note = Human gut metagenome

SEQ ID NO: 24884 - protein, 478 aa, unidentified; identical to SEQ ID NO: 24568
  REGION 1..478: note = Human gut metagenome

SEQ ID NO: 24885 - protein, 478 aa, unidentified; identical to SEQ ID NO: 24531
  REGION 1..478: note = Human gut metagenome

SEQ ID NO: 24886 - protein, 433 aa, unidentified
  REGION 1..433: note = Human gut metagenome
MQSHIRAFVLDKDRKPLMPCHAAKARKLLKKGKAAVFRRFPFTIILKERTREASAIQDVLVKVDPGSKSTGLAVVRKDEKNVHHALAFICLNHRGSKIRDALTSRRQLRRGRRSRNLRYRAPRFLNRKKPKGWLAPSLQHRVDAVMSWMNRLTRLVPVAGFVQELVKFDTQLMQNAAISGVEYQQGELAGYELKEYLLEKFDRKCVYCGKSGVVLNVEHIIPKARGGSNRVSNLAIACTQCNQKKGAMPIEDFLKKKPALLAQIRKQLKTPLRDATAVNATRWALYRNLQATGCTVEVGSGALTKFNRHAFSVPKEHWLDALCAGRIDGVADWEKLRPLQAYCIGRGSHKRTRTDKYGFPLCYFSRYKRPNDFGTGDYVRVKVTRGRNTGIWIGRATLTDGKLSVETKAGRVKATFLNSKCLFKSDGYKYQYL

SEQ ID NO: 24887 - protein, 501 aa, unidentified; identical to SEQ ID NO: 24556
  REGION 1..501: note = Human gut metagenome

SEQ ID NO: 24888 - protein, 433 aa, unidentified
  REGION 1..433: note = Human gut metagenome
MQTHIRAFVLDKDRKPLMPCHAARARKLLKKGKAAVFRRFPFTIILKERTREVSVVQDVLVKIDPGSKSTGIAVVRKDKKDVHHALAFICLNHRGSKIRDALTSRRQLRRGRRSRNLRYRSPRFLNRTKPKGWLAPSLQHRVDTVMSWMNRLTRLVPVTGFVQELVKFDTQRMQNAAISGVEYQQGELAGYELKEYLLEKFDRKCVYCGKSGVVLNVEHIIPKARGGSNRVSNLAIACVQCNQKKGAMPIEDFLKKKPALLAQIRKLLKTPLRDAATVNATRWSLFRSLQAMGGAVAVGSGALTKFNRHAFCVPKEHWLDALCAGRINGVADWENLRPLQAYCIGRGSHKRTRTDKYGFPLCYFSRRKRPNDFGTGDYVRVKVTRGRNAGIWTGRATLTNGKLSVETKVGRVKATFQNGKVLFKNDGYKYQYL

SEQ ID NO: 24889 - protein, 373 aa, unidentified
  REGION 1..373: note = Human gut metagenome
VKVDPGSKSTGLAVVRKDEKNVHHALAFICLNHRGSKIRDALTSRRQLRRGRRSRNLRYRAPRFLNRKKPKGWLAPSLQHRVDAVMSWMNRLTRLVPVAGFVQELVKFDTQLMQNAAISGVEYQQGELAGYELKEYLLEKFDRKCVYCGKSGVVLNVEHIIPKARGGSNRVSNLAIACAQCNQKKGAMPIEDFLKKKPALLAQIRKQLKTPLRDAAAVNATRWALYRNLQATGCTVEIGSGALTKFNRHAFSVPKEHWLDALCAGRIDGVADWENLRPLQAYCIGRGSHKRTRTDKYGFPLCYFSRYKRPNDFGTGDYVRVKVTRGRNTGIWIGRATLTDGKLSVETKAGRVKATFLNSKCLFKSDGYKYQYL

SEQ ID NO: 24890 - protein, 491 aa, Moorena sp.
MSSPVFVQDSQGTPLMPTSAAYARRLLQQGKAQWVPHHAFPVIQLTHAIQQPTLRPILIGVAIHLNAANLYLIAEGEQAALPLLHTIVDLRTDLPTRLRRRAAHRKRRRNRARYRAPRKHGRPFKLRRPSMLRSAWSQQVHRGRQPTPMRVRHLSHTIRWRSQAIMRVICALQKLLPISHAIILSPAELRGPQEMSGTALRQLLIDTYGQIDTAGNRHPMCAYCLTTEGRIEAEHIIPRSRGGTDGWQNRVLACAACNARKGNRLPEEADMPLRIPLHSEPASPNRAGSYARATGRALIESLRVLGLPTRLLHQADDPRTHWPVALYPELLKIWETSDSVAKAVAKPISRPSKQVFTGRNYPLDTKLRPGMVRLGSAIRRRVQVNRAIVIEIAKTRRAVRIIGANEPIPASATQVIMLGALCEGLRREQRVVGIVAALHTAGRLTLLVPENAGSTGVNWRRVVISPRRHLRILSTDPIIFLPLPTRDDHAS

SEQ ID NO: 24891 - protein, 478 aa, unidentified; identical to SEQ ID NO: 24531
  REGION 1..478: note = Human gut metagenome

SEQ ID NO: 24892 - protein, 464 aa, unidentified; identical to SEQ ID NO: 24557
  REGION 1..464: note = Human gut metagenome

SEQ ID NO: 24893 - protein, 493 aa, unidentified
  REGION 1..493: note = Human gut metagenome
APPQTEHHAVDVPHRMTGNCTRSVKGKNKMPVCVLSANGERLMPTENYGKVRHLLKDGRAVIAKRNPFTIQLTYDTSTYTQPIEMCVGTGYEHIGVSIKTKAKEVVSQQYDMLTNERSRHDDCRAYRRTRRNRLRYRAARFNNRVSGKKPGWIAPSLDNKVERHLDIISRYLSVMPVTDVFIKAATYDTQLLAALEAGEPVPQGKDYQHGPQYGYDTLREAVFERDHYTCVYCKRGLKDGAILHVHHAYYWKGLHGNSMRELATCCEKCNTPANHKEGGKLWGFDKPLRKYTGEAFMNSVRWILYQRAMARFQGVAEVHMTYGVISKRVRTNLGLPYSCATDAYCMGELRPEARCETEVFQKYRRNNRVLSKFYDAKYYDTREKGVIRSGNELSSGRTNRNHNLDGENLRRFRGCKKSKGRTSTRKQRYAMQPGDIVVYGNRKYVSKGCSSYGRALSLLTDGKPLVVSMKKIQLVRHKGGWVRLPQAAAGAKE

SEQ ID NO: 24894 - protein, 569 aa, unidentified
  REGION 1..569: note = Human gut metagenome
MPDKVYVISRLGHPLMPCSPAKAHHLLDDKKAKVVKRMPFTIRLLYGSTKYIQPIILGVDAGSKTIGLSASTAKEEVFAAEVMPRNDVVENLSTRREFRRARRNRTTRYRKPRSDNRVRSNHERWLAPSVKVKIQEHITSIKRVCTILPISKVVIETAEFDLQLLKAIQEGKPIPEGEDYQKGEMYGSYNVRQYVLWRDNYTCICCGVRGTPKNPVRLHVHHFESRKHGGNAPDNHGTLCDDCHKKFHLGIITDVKLKTRRRQSTRDAAFMGIARSEYNYVYSKQSKIFHTRKCSHVLLAYDIQGTVSYDTCLKSGRRPCKHCNPEPIERKTIAFPVLPKKPQSPQERSLSKDEQSAIGRFNRAKQEREAAFKKGSLSDAEKSNIMALSQPGLAFWASKGYRTFHRRNCSQISGLNQLVGFPRYQDAVRAGYCPCRHCKPSPKQDVVYSIPITNKKRAGEGVETLVQLCTEHCLPFHHDNRYFEMQTMVGKWKIDMDLRPVRLEHINLISQPENTKKYHVQPRLFLSLKDTFDYIKLVVSKNEKSVLKITELSIAAAELSALVFFKALL

SEQ ID NO: 24895 - protein, 452 aa, Lactobacillus sp.; identical to SEQ ID NO: 24570

SEQ ID NO: 24896 - protein, 478 aa, unidentified; identical to SEQ ID NO: 24594
  REGION 1..478: note = Human gut metagenome

SEQ ID NO: 24897 - protein, 416 aa, unidentified; identical to SEQ ID NO: 24575
  source 1..416: note = Ligilactobacillus sp.

SEQ ID NO: 24898 - protein, 478 aa, unidentified; identical to SEQ ID NO: 24531
  REGION 1..478: note = Human gut metagenome

SEQ ID NO: 24899 - protein, 366 aa, unidentified
  REGION 1..366: note = Human gut metagenome
MAVCVLSANGERLMPTENYGKVRHLLKDGRAVIAKRNPFTIQLTYDTSTYTQPIEMCVGTGYEHIGVSIKTKAKEVVSQQYDLLTNERSRHDDCRAYRRTRRNRLRYRAARFNNRVSSKKPGWIAPSLDNKVERHLDIISRYLSVMPVKDVFIKAATYDTQLLAALEAGEPVPQGKDYQHGPQYGYDTLREAVFERDHYTCVYCKRGLKDGAILHVHHAYYWKGLHGNSMRELATCCEKCNTPANHKEGGKLWGFDKPLRKYTGEAFMNSVRWILYQRAMARFQGVAEVHMTYGVISKRVRTNLGLPYSCATDAYCMGELRPEARCETEVFQKYRRNNRVLSKFYDAKYYDCLLYTSPSPRDYAAS

SEQ ID NO: 24900 - protein, 469 aa, unidentified
  REGION 1..469: note = Human gut metagenome
MPVCVLSANGERLMPTENYGKVRHLLKDGRAVIAKRNPFTIQLTYETSTYTQPIELCVGTGYEHIGVSIKAKAKEVVSQQYDLLTNERSRHDDCRAYRRTRRNRLRYRAARFNNRVSSKMPGWIAPSLDNKVERHLDIISRYLSVMPVKDVFIKAATYDTQLLAALEAGEPVPQGKDYQHGPQYGYDTLREAVFERDHYTCVYCKRGLKDGAILHVHHAYYWKGLHGNSMRELATCCEKCNTPANHKEGGKLWGFDKPLRKYTGEAFMNSVRWILYQRAMARFQGAAEVHMTYGVISKRVRTNLGLPYSCATDAYCMGELRPEARCETEVFQKYRRNNRVLSKFYDAKYYDTREKGVIRSGNELFSGRTNRNHNLDGENLRRFRGCKKSKGRTSTRKQRYAMQPGDIVVYGNRKYVSKGCSSYGKALSLLTDGKPLMVSMKKIQLVRHKGGWVRLPHAAAEAKKITTCG

SEQ ID NO: 24901 - protein, 443 aa, unidentified
  REGION 1..443: note = Human gut metagenome
MMKVFVLDKDHKPLMPCGPARARKLLKAGRARVHKLQPFTIRIVDRSLADSVVQKVVVKVDPGSKETGIAVVREDEEETHHALYFINLKHRGAAIRDALTSRRQLRRGRRSRNLRYRASRFLNRSKPKGWLPPSLQHRVDTTLSWVNRLRRLAPVSGIAQELVKFDTQLMQNPDISGVEYQQGELAGYELKEYLLEKFGRRCVYCAKSDVPLNVEHIVPKARGGSNRLSNLAIACVECNQKKGAKPIEEFLKGKPELLARVRKQLKTPLRDAASVNATRWALFHALSATGLPVRTGSGALTKYNRHCFGVPKEHWFDALCVGRINGVSYDSCMKVLNVSCTGRGQYKRTRTDKFGFPICHFMRTKRPHGVGLGDLVRMTVQKGKHPGIWTGRAFPSNDGRVVLILPEFRIWGRARNCSILSLSDGYGYRLTDSETTKPTSFGK

SEQ ID NO: 24902 - protein, 464 aa, unidentified; identical to SEQ ID NO: 24525
  REGION 1..464: note = Human gut metagenome

SEQ ID NO: 24903 - protein, 464 aa, unidentified; identical to SEQ ID NO: 24576
  REGION 1..464: note = Human gut metagenome

SEQ ID NO: 24904 - protein, 460 aa, unidentified; identical to SEQ ID NO: 24625
  REGION 1..460: note = Human gut metagenome

SEQ ID NO: 24905 - protein, 478 aa, unidentified; identical to SEQ ID NO: 24531
  REGION 1..478: note = Human gut metagenome

SEQ ID NO: 24906 - protein, 455 aa, unidentified; identical to SEQ ID NO: 24633
  REGION 1..455: note = metagenome

SEQ ID NO: 24907 - protein, 478 aa, unidentified
  REGION 1..478: note = Human gut metagenome
MTGNCTRSVKGKNKMPVCVLSANGERLMPTENYGKVRHLLKDGRAVIAKRNPFTIQLTYDTSTYTQPIEMCVGTGYEHIGVSIKTKAKEVVSQQYDMLTNERSRHDDCRAYRRTRRNRLRYRAARFNNRVSGKKPGWIAPSLDNKVERHLDIISRYLSVMPVTDVFIKAATYDTQLLAALEAGEPVPQGKDYQHGPQYGYDTLREAVFERDHYTCVYCKRGLKDGAILHVHHAYYWKGLHGNSMRELATCCEKCNTPANHKEGGKLWGFDKPLRKYTGEAFMNSVRWILYQRAMARFQGVAEVHMTYGVISKRVRTNLGLPYSCATDAYCMGELRPEARCETEVFQKYRRNNRVLSKFYDAKYYDTREKGVIRSGNELSSGRTNRNHNLDGENLRRFRGCKKSKGRTSTRKQRYAMQPGDIVVYGNRKYVSKGCSSYGRALSLLTDGKPLMVSMKKIQLVRHKGGWVRLPHAAAAAKK

SEQ ID NO: 24908 - protein, 432 aa, unidentified
  REGION 1..432: note = Ga0315298_1009712
MTQNRVLVLDRNRQPLMPCHPARARELLRDGKAAVFRRQPFTIILKDREGGVTQDIQAKTDPGSQETGVALVANFARRGPTVIWAGELTHRGDRIRKALEQRKGHRRFRRSRLRYRPVRFLNRTRKAGWLPPSLQHRVDTIMTWIWRFLRWSPVTALSQELVRFDTQALQNPEISGVEYQQGTLQGYEVREYLLEKWNRKCAYCGAEQVPLEIDHIHPRGKGGSDRVSNLTLACHLCNQRKGKREVAEFLAKDPERIRRILAQAKAPLRDAAAVNSTRWALFQRLRATNLPVEVGSGGRTKWNRSRQSYPKAHWIDAACVGESGGKVRLHPDHQILKIKAMGHGERQRSRLDRYGFPIGHKAGAKSFWGFQTGDRVRAVIVKGKHAGTWIGRIAIRFRPSFVLHSSVGDRSLEVHPKYLTLLQRNDGYVYTQ

SEQ ID NO: 24909 - protein, 478 aa, unidentified
  REGION 1..478: note = Human gut metagenome
MTGNCTRSVKGKNKMPVCVLSANGERLMPTENYGKVRHLLKDGRAVIAKRNPFTIQLTYDTSTYTQPIEMCVGTGYEHIGVSIKTKAKEVVSQQYDMLTNERSRHDDCRAYRRTRRNRLRYRAARFNNRVSGKKPGWIAPSLDNKVERHLDIISRYLSVMPVTDVFIKAATYDTQLLAALEAGEPVPQGKDYQHGPQYGYDTLREAVFERDHYTCVYCKRGLKDGAILHVHHAYYWKGLHGNSMRELATCCEKCNTPANHKEGGKLWGFDKPLRKYTGEAFMNSVRWILYQRAMARFQGVAEVHMTYGVISKRVRTNLGLPYSCATDAYCMGERRPEARCETEVFQKYRRNNRVLSKFYDAKYYDTREKGVIRSGNELSSGRTNRNHNLDGENLRRFRGCKKSKGRTSTRKQRYAMQPGDIVVYGNRKYVSKGCSSYGRALSLLTDGKPLMVSMKKIQLVRHKGGWVRLPHAAAEAKK

SEQ ID NO: 24910 - protein, 464 aa, unidentified; identical to SEQ ID NO: 24525
  REGION 1..464: note = Human gut metagenome

SEQ ID NO: 24911 - protein, 464 aa, unidentified; identical to SEQ ID NO: 24576
  REGION 1..464: note = Human gut metagenome

SEQ ID NO: 24912 - protein, 478 aa, unidentified
  REGION 1..478: note = Human gut metagenome
MTGNCTRSVKGKNKMPVCVLSANGERLMPTENYGKVRHLLKDGRAVIAKRNPFTIQLTYDTSTYTQPIEMCVGTGYEHIGVSIKTKAKEVVSKQYDMLTNERSRHDDCRAYRRTRRNRLRYRAARFNNRVSGKKPGWIAPSLDNKVERHLDIISRYLSVMPVTDVFIKAATYDTQLLAALEAGEPVPQGKDYQHGPQYGYDTLREAVFERDHYTCVYCKRGLKDGAILHVHHAYYWKGLHGNSMRELATCCEKCNTPANHKEGGKLWGFDKPLRKYTGEAFMNSVRWILYQRAMARFQGVAEVHMTYGVISKRVRTNLGLPYSCATDAYCMGELRPEARCETEVFQKYRRNNRVLSKFYDAKYYDTREKGVIRSGNELSSGRTNRNHNLDGENLRRFRGCKKSKGRTSTRKQRYAMQPGDIVVYGNRKYVSKGCSSYGRALSLLTDGKPLMVSVKKIQLVRHKGGWVRLPQAAAGAKE

SEQ ID NO: 24913 - protein, 478 aa, unidentified; identical to SEQ ID NO: 24701
  REGION 1..478: note = Human gut metagenome

SEQ ID NO: 24914 - protein, 460 aa, unidentified
  REGION 1..460: note = Human gut metagenome
LARGTLRQRSILWNRLLPDSRKGKDFFMQPHIRAFVLDKDRKPLMPCHAARARKLLKKGKAAVFRRFPFTIILKERTREASAVQDVLVKIDPGSKSTGIAVVRKDKKDVQHALAFICLNHRGSKIRDALTSRRQLRRGRRSRNLRYRAPRFLNRTKPQGSLAPSLRHRVDTVMSWMNRLTRLVPVTGFVQELVKFDTQLMQNAAISGVEYQQGELAGYELKEYLLEKFDRKCVYCGKSGVVLNVEHLIPKARGGSNRVSNLAIACVQCNQKKGAMPIEDFLKKKPALLAQIRKQLKTTLRDAAAVNATRWSLFRSLQSTGCTVEVGSGAQTKFNRHAFSVPKEHWLDALCTGRIDGVADWEKLRPLQAYCIGRGSHKRTRTDKYGFPLCYFSRRKRPNDFGTGDYVRVKVTRGRNAGIWTGRATLTDGKLSVETKAGRVKATFLNSKCLFKSDGYKYQYL

SEQ ID NO: 24915 - protein, 464 aa, unidentified; identical to SEQ ID NO: 24793
  REGION 1..464: note = gut metagenome

SEQ ID NO: 24916 - protein, 443 aa, unidentified
  REGION 1..443: note = Human gut metagenome
MMKVFVLDKDHKPLMPCGPARARKLLKAGRARVHKLQPFTIRIVDRSLADSVVQKVVVKVDPGSKETGIAVVREDEEETHHALYFINLKHRGAAIRDALTSRRQLRRGRRSRNLRYRAPRFLNRSKPKGWLPPSLQHRVDTTLSWVNRLRRLAPVSGIAQELVKFDTQRMQNPEISGVEYQQGELAGYELKEYLLEKFGRRCVYCAKSGVPLNVEHIVPKARGGSNRLSNLAIACVECNQKKGARPIEEFLKGKPELLARIRKRLKTPLRDAASVNATRWALFEALRATGLPIRTGSGALTKYNRHCFGVPKEHWFDALCVGRINGVSYDSCMKVLNVSCTGRGQYKRTRTDKFGFPICHFMRTKRPHGVGLGDLVRMTVQKGKHPGIWTGRAFPSNDGRVVLILPEFRIWGRARNCSILSLSDGYGYRLTDSETTKPTSFGK

SEQ ID NO: 24917 - protein, 453 aa, Moorena sp.; identical to SEQ ID NO: 24539

SEQ ID NO: 24918 - protein, 433 aa, unidentified; identical to SEQ ID NO: 24672
  REGION 1..433: note = Human gut metagenome

SEQ ID NO: 24919 - protein, 500 aa, unidentified; identical to SEQ ID NO: 24707
  REGION 1..500: note = Human gut metagenome

SEQ ID NO: 24920 - protein, 344 aa, unidentified
  REGION 1..344: note = Human gut metagenome
LYVHAAREIAALLEGVHELRRGRRSRNLRYRAPRFLNRKKPKGWLAPSLQHRVDAVMSWMNRLTRLVPVAGFVQELVKFDTQLMQNAAISGVEYQQGELAGYELKEYLLEKFDRKCVYCGKSGVVLNVEHIIPKARGGSNRVSNLAIACTQCNQKKGAMPIEDFLKKKPALLAQIRKQLKTTLRDAAAVNATRWSLFRSLQSTGCTVEVGSGAQTKFNRHAFSVPKEHWLDALCTGRIDGVADWEKLRPLQAYCIGRGSHKRTRTDKYGFPLCYFSRRKRPNDFGTGDYVRVKVTRGRNAGIWTGRATLTDGKLSVETKAGRVKATFLNSKCLFKSDGYKYQYL

SEQ ID NO: 24921 - protein, 443 aa, unidentified
  REGION 1..443: note = Human gut metagenome
MMKVFVLDKDHKPLMPCGPARARKLLKAGRARVHKLQPFTIRIVDRSLADSVVQKVVVKVDPGSKETGIAVVREDEEETHHALYFINLKHRGAAIRDALTSRRQLRRGRRSRNLRYRAPRFLNRSKPKGWLPPSLQHRVDTTLSWVNRLRRLAPVSGIAQELVKFDTQLMQNPDISGVEYQQGELAGYELKEYLLEKFGRRCVYCAKSDVPLNVEHIVPKARGGSNRLSNLAIACVECNQKKGARPIEEFLKGKPELLARVRKQLKTPLRDAASVNATRWALFHALSATGLPVRTGSGALTKYNRHCFGVPKEHWFDALCVGRINGVSYDSCMKVLNVSCTGRGQYKRTRTDKFGFPICHFMRTKRPHGVGLGDLVRMTVQKGKHPGIWTGRAFPSNDGRVVLILPEFRIWGRARNCSILSLSDGYGYRLTDSETTKPTSFGK

SEQ ID NO: 24922 - protein, 464 aa, unidentified
  REGION 1..464: note = Human gut metagenome
MAVCVLSANGERLMPTENYGKVRHLLKDGRAVIAKRNPFTIQLTYDTSTYTQPIEMCVGTGYEHIGVSIKTKAKEVVSQQYDLLTNERSRHDDCRAYRRTRRNRLRYRAARFNNRVSSKKPGWIAPSLDNKVERHLDIISRYLSVMPVKDVFIKAATYDTQLLAALEAGEPVPQGKDYQHGPQYGHDTLREAVFERDHYTCVYCKRGLKDGAILHVHHAYYWKGLHGNSMRELATCCEKCNTPANHKEGGKLWGFDKPLRKYTGEAFMNSVRWILYQRAMARFQGAAEVHMTYGVISKRVRTDLGLPYSCATDAYCMGELRPEARCDTEVFQKYRRNNRVLSKFYDAKYYDTREKGVIRSGNDLSSGRTNRNHNLDGENLRRFRGCKKSKGRTSTRKQRYAMQPGDIVVYGNRKYVSKGCSSYGRALSLLTDGKPLMVSTKKIQLVRPKGGWVRLPQAAVGAKE

SEQ ID NO: 24923 - protein, 443 aa, unidentified
  REGION 1..443: note = Human gut metagenome
MMKVFVLDKDHKPLMPCGPARARKLLKAGRARVHKLQPFTIRIVDRSLADSVVQKVVVKVDPGSKETGIAVVREDEEETHHALYFINLKHRGAAIRDALTSRRQLRRGRRSRNLRYRAPRFLNRSKPKGWLPPSLQHRVDTTLSWVNRLRRLAPVSGIAQELVKFDTQLMQNPDISGVEYQQGELAGYELKEYLLEKFGRRCVYCAKSDVPLNVEHIVPKARGGSNRLSNLAIACVECNQKKGAKPIEEFLKGKPELLARVRKQLKTPLRDAASVNATRWALFHALSATGLPVRTGSGALTKYNRHCFGVPKEHWFDALCVGRINGVSYDSCMKVLNVSCTGRGQYKRTRTDKFGFPICHFMRTKRPHGVGLGDLVRMTVQKGKHPGIWTGRAFPSNDGSVVLILPEFRIKGRARNCSILSLSDGYGYCLTDSETAKPTSFGK

SEQ ID NO: 24924 - protein, 433 aa, unidentified; identical to SEQ ID NO: 24682
  REGION 1..433: note = metagenome

SEQ ID NO: 24925 - protein, 411 aa, unidentified
  REGION 1..411: note = Human gut metagenome
VHKLQPFTIRIVDRSLADSVVQPIIVKVDPGSKETGIAVVREDEEETHHALYFINLKHRGAAIRDALTSRRQLRRGRRSRNLRYRAPRFLNRSKPKGWLPPSLQHRVDTTLSWVNRLRRLAPVSGIAQELVKFDTQRMQNPEISGVEYQQGELAGYELKEYLLEKFGRRCVYCAKSGVPLNVEHIVPKARGGSNRLSNLAIACVECNQKKGARPIEEFLKGKPELLARIRKRLKTPLRDAASVNATRWALFEALRATGLPIRTGSGALTKFNRHCFGVPKEHWFDALCVGRINGVSYEPGMKVLNVSCTGRGQYKRTRTDKFGFPICHFMRTKRPHGVGLGDLVRMTVQKGKHPGIWTGRAFPSNDGRVVLILPEFRIWGRARNCSILSLSDGYGYCLTDSETAKPTSFGK

SEQ ID NO: 24926 - protein, 478 aa, unidentified; identical to SEQ ID NO: 24531
  REGION 1..478: note = Human gut metagenome

SEQ ID NO: 24927 - protein, 453 aa, Moorena sp.; identical to SEQ ID NO: 24695

SEQ ID NO: 24928 - protein, 464 aa, unidentified; identical to SEQ ID NO: 24684
  REGION 1..464: note = Human gut metagenome

SEQ ID NO: 24929 - protein, 478 aa, unidentified; identical to SEQ ID NO: 24531
  REGION 1..478: note = Human gut metagenome

SEQ ID NO: 24930 - protein, 417 aa, unidentified; identical to SEQ ID NO: 24686
  REGION 1..417: note = gut metagenome

SEQ ID NO: 24931 - protein, 443 aa, unidentified; identical to SEQ ID NO: 24617
  REGION 1..443: note = Human gut metagenome

SEQ ID NO: 24932 - protein, 429 aa, unidentified
  REGION 1..429: note = Candidate division MSBL1 archaeon
MSKKVYVQNKDGTPLMPCKPAKARHLLRDDKAEVVEKTPFTIRLNWDCEENTQQVRLGIDTGSKKAGIAAVRENGQLLYQSKVELRTDVKQKMDRRRRYRRTRRNRKTRYRKPRFDNRKRKKGWLPPSLKSKANSTIKSVKQVSKLLPISSVTVEIAPFDMQKIKNPGIEGEQYQNGELKGHSSVRQYVLYRDKHQCINCKKDDVPLQVHHLKPRSKGGTEKPGNMVSLCVECHEKLHRDEIELSEKSLNYWTNKEYKYASHVNSMKNYLVKELRKLFNVKITFGNVTKAARKELGLDKSDVNDAIAIACLDFAKRIRKLSHTFLQKCLPRGRYQLYKGERSERRIPTEGFNGFDRWDKVELPNGTMGFVKGRRKSGYFDVSDINGNSYTHSIKYTKLNLISKAETIITELKGNSSPLNQRLEGVSLPG

SEQ ID NO: 24933 - protein, 478 aa, unidentified; identical to SEQ ID NO: 24701
  REGION 1..478: note = Human gut metagenome

SEQ ID NO: 24934 - protein, 478 aa, unidentified; identical to SEQ ID NO: 24531
  REGION 1..478: note = Human gut metagenome

SEQ ID NO: 24935 - protein, 452 aa, Lactobacillus sp.; identical to SEQ ID NO: 24570

SEQ ID NO: 24936 - protein, 478 aa, unidentified; identical to SEQ ID NO: 24531
  REGION 1..478: note = Human gut metagenome

SEQ ID NO: 24937 - protein, 500 aa, unidentified
  REGION 1..500: note = Human gut metagenome
MTGSYTAAPPQTEHHAVDVPHRMTGNCTRSVKGKNKMPVCVLSANGERLMPTENYGKVRHLLKDGRAVIAKRNPFTIQLTYETSTYTQSIEMCVGTGYEHIGVSIKTKAKEVVSQQYDLLTNERSRHDDCRAYRQTRRNHLRYRAARFNNRVSSKKPGWIAPSLDNKVERHLDIISRYLSVMPVTDVFIKAATYDTQLLAALEAGEPVPQGKDYQHGPQYGFDTLREAVFERDHYTCVYCKRGLKDGAILHIHHAYYWKGLHGNSMRELATCCEKCNTPANHKEGGKLWGFDKPLRKYTGEAFMNSVRWILYQRAMARFQGAAEVHMTYGVISKRVRTDLGLPYSCATDAYCMGELRPEARCETEVFQKYRRNNRVLSKFYDAKYYDTREKGVIRSGNELSSGRTNRNHNLDGENLRRFRGCKKSKGRTSTRKQRYAMQPGDIVVYGNRKYVSKGCSSYGRALSLLTDGKPLVVSMKKIQLVRHKGGWVRLPQAAAGAKE

SEQ ID NO: 24938 - protein, 460 aa, unidentified
  REGION 1..460: note = Human gut metagenome
LARGTLRQRSILWNRLLPDSRKGKDFFMQPHIRAFVLDKDRKPLMPCHAARARKLLKKGKAAVFRRFPFTIILKERTREASAVQDVLVKIDPGSKSTGIAVVRKDKKDVHHALAFICLNHRGSKIRDALTSRRQLRRGRRSRNLRYRSPRFLNRTKPKGWLCALSRHRVDTVMSWMNRLTRLVPVTGFVQELVKFDTQLMQNAAISGVEYQQGELAGYELKEYLLEKFDRKCVYCGKSGVVLNVEHIIPKARGGSNRVSNLAIACVQCNQKKGAMPIEDFLKKKPALLAQIRKQLKTTLRDAAAVNATRWSLFRSLQSTGCTVEVGSGAQTKFNRHAFSVPKEHWLDALCTGRIDGVADWEKLRPLQAYCIGRGSHKRTRTDKYGFPLCYFSRRKRPNDFGTGDYVRVKVTRGRNAGIWTGRATLTDGKLSVETKAGRVKATFLNSKCLFKSDGYKYQYL

SEQ ID NO: 24939 - protein, 416 aa, Lactobacillus sp.; identical to SEQ ID NO: 24575

SEQ ID NO: 24940 - protein, 464 aa, unidentified; identical to SEQ ID NO: 24525
  REGION 1..464: note = Human gut metagenome

SEQ ID NO: 24941 - protein, 360 aa, Moorena sp.; identical to SEQ ID NO: 24649

SEQ ID NO: 24942 - protein, 433 aa, Sutterella sp.; identical to SEQ ID NO: 24563

SEQ ID NO: 24943 - protein, 448 aa, Lactobacillus sp.; identical to SEQ ID NO: 24592

SEQ ID NO: 24944 - protein, 470 aa, unidentified
  REGION 1..470: note = Gammaproteobacteria bacterium
MAVLILDKRKNPLMPCSEKRARLLLERGRARVHRKAPFIIRLVDRGVEDSALQPLRLKLDPGSKTTGIALVRERETVDPATGKSTRAQAVVFLAELAHRGHLIRDRLTARRAFRRRRRGTLRYRAPRFLNRTRPRGWLAPSLRHRVDTTMVWVDRLMRWAPVAGLSTLLHRFDTQALQNPGISGIEYQHGTLTGYEVREYLLEKWRRRCAYCDAENVPLTVDHIHPKSRGGSDRVSNLALACVPCNQRKGNRDVTEFLLHDPKRLAHIEAQRKAPLKDAAAVNSTRWALLGRLKKTGLDVEVGTGGRTKYNRARLSIPKTHSLDAACVGRVDRLSGWRRPVLRIAATGRGAYQRTRLTKYGFPRGYLTRQKRHFGFQTGDLVKAIVTSGRKAGTYIGRVAVRASGSFNIRTGQAVVQGLHHRFFTLIQRADGYGYSWTKIALEKGGAGTGAAVAAALSLPGLNAGVSRAN

SEQ ID NO: 24945 - protein, 478 aa, unidentified
  REGION 1..478: note = Human gut metagenome
MTGNCTRSVKGKNKMPVCVLSANGERLMPTENYGKVRHLLKDGRAVIAKRNPFTIQLTYDTSTYTQPIEMCVGTGYEHIGVSIKTKAKEVVSQQYDMLTNERSRHDDCRAYRRTRRNRLRYRAARFDNRVSGKKPGWIAPSLDNKVERHLDIISRYLSVMPVTDVFIKAATYDTQLLAALEAGEPVPQGKDYQHGPQYGYDTLREAVFERDHYTCVYCKRGLKDGAILHVHHAYYWKGLHGNSMRELATCCEKCNTPANHKEGGKLWGFDKPLRKYTGEAFMNSVRWILYQRAMARFQGVAEVHMTYGVISKRVRTNLGLPYSCATDAYCMGELRPEARCETEVFQKYRRNNRVLSKFYDAKYYDTREKGVIRSGNELSSGRTNRNHNLDGENLRRFRGCKKSKGRTSTRKQRYAMQPGDIVVYGNRKYVSKGCSSYGRALSLLTDGKPLMVSMKKIQLVRHKGGWVRLPHAAAEAKK

SEQ ID NO: 24946 - protein, 478 aa, unidentified; identical to SEQ ID NO: 24701
  REGION 1..478: note = Human gut metagenome

SEQ ID NO: 24947 - protein, 464 aa, unidentified; identical to SEQ ID NO: 24576
  REGION 1..464: note = Human gut metagenome

SEQ ID NO: 24948 - protein, 433 aa, unidentified; identical to SEQ ID NO: 24563
  REGION 1..433: note = Human gut metagenome

SEQ ID NO: 24949 - protein, 500 aa, unidentified; identical to SEQ ID NO: 24707
  REGION 1..500: note = Human gut metagenome

SEQ ID NO: 24950 - protein, 464 aa, unidentified; identical to SEQ ID NO: 24576
  REGION 1..464: note = Human gut metagenome

SEQ ID NO: 24951 - protein, 443 aa, unidentified
  REGION 1..443: note = metagenome
MMKVFVLDKDHKPLMPCGPARARKLLKAGRARVHKLQPFTIRIVDRSLADSVVQKVVVKVDPGSKETGIAVVREDEEETHHALYFINLKHRGAAIRDALTSRRQLRRGRRSRNLRYRAPRFLNRSKPKGWLPPSLQHRVDTTLSWVNRLRRLAPVSGIAQELVKFDTQRMQNPEISGVEYQQGELAGYELKEYLLEKFGRRCVYCAKSDVPLNVEHIVPKARGGSNRLSNLAIACVECNQKKGAKPIEEFLKGKPELLARVRKQLKTPLRDAASVNATRWALFEALRATGLPIRTGSGALTKFNRHCFGVPKEHWFDALCVGRINGVSYEPGMKVLNVSCTGRGQYKRTRTDKFGFPICHFMRTKRPHGVGLGDLVRMTVQKGKHPGIWTGRAFPSNDGRVVLILPEFRIWGRARNCSILSLSDGYGYRLTDSETTKPTSFGK

SEQ ID NO: 24952 - protein, 478 aa, unidentified; identical to SEQ ID NO: 24531
  REGION 1..478: note = Human gut metagenome

SEQ ID NO: 24953 - protein, 417 aa, unidentified; identical to SEQ ID NO: 24686
  REGION 1..417: note = Human gut metagenome

SEQ ID NO: 24954 - protein, 478 aa, unidentified; identical to SEQ ID NO: 24531
  REGION 1..478: note = Human gut metagenome

SEQ ID NO: 24955 - protein, 500 aa, unidentified
  REGION 1..500: note = Human gut metagenome
MTGSYTVKRRKRFPTVVDIPHRMTGNCTRSVKGKNKMPVCVLSANGERLMPTENYGKVRHLLKDGRAVIAKRNPFTIQLTYDTSTYTQPIELCVGTGYEHIGVSIKAKAKEVVSQQYDLLTNERSRHDDCRAYRRTRRNHLRYRAARFNNRVSSKKPGWIAPSLDNKVERHLDIISRYLSVMPVTDVFIKAATYDTQLLAALEAGEPVPQGKDYQHGPQYGYDTLREAVFERDHYTCVYCKRGLKDGAILHVHHAYYWKGLHGNSMRELATCCEKCNTPANHKEGGKLWGFDKPLRKYTGEAFMNSVRWILYQRAMARFQGVAEVHMTYGVISKRVRTNLGLPYSCATDAYCMGELRPEARCETEVFQKYRRNNRVLSKFYDAKYYDTREKGVIRSGNELSSGRTNRNHNLDGENLRRFRGCKKSKGRTSTRKQRYAMQPGDIVVYGNRKYVSKGCSSYGKALSLLTDGKPLMVSMKKIQLVRHKGGWVRLPHAAAEAKK

SEQ ID NO: 24956 - protein, 443 aa, unidentified; identical to SEQ ID NO: 24540
  REGION 1..443: note = Human gut metagenome

SEQ ID NO: 24957 - protein, 472 aa, Symploca sp.
VRGEVLRARNLEQHWRRTLPERVQLYVVEKMKVCVVNIGERPLMPTTPRKAKILLREGAAKIFRRDPFTIQLLSDCHGYIQPATLGIDAGYLNIGYSALNQTAELIGGEVKMLEGISERITEKLKYRRTRRNRLRYRAPRFDNRRRNDGWLTPSIQHKLDTHHRLIDRIKSVLPIDEVMIEVANFDIQKIKNQEISGDGYQQGEQKGFDNLREYLLHRDGHKCQHPECRNKSKQPILQVHHLGFWKNPPDRTERPGNLITLCNKCHTPAQHKKKGKLFGWEPKIKPFKPETFMSTVRWRLTKDTGYKVTFGHITKAKRRLLKLDKSHHNEAFVIAGGEYQTRCEALNLVQIRRNKRSMEQFYDAKYLDIRDKKSKSGTELFSGRRTRNKNLNSENLRAYRGHKLFKGQRRVKKLRYRYQPHDEVEFEGAVFEVVGMQNQGTGVKLKDYPGIKNKVVKISAVKSVKKRGGICA

SEQ ID NO: 24958 - protein, 433 aa, unidentified
  REGION 1..433: note = Human gut metagenome
MQPHIRAFVLDKDRKPLMPCHAAKARKLLKKGKAAVFRRFPFTIILKERTREASAIQDVLVKVDPGSKSTGLAVVRKDEKNVHHALAFICLNHRGSKIRDALTSRRQLRRGRRSRNLRYRAPRFLNRKKPKGWLAPSLQHRVDAVMSWMNRLTRLVPVAGFVQELVKFDTQLMQNAAISGVEYQQGELAGYELKEYLLEKFDRKCVYCGKSGVVLNVEHIIPKARGGSNRVSNLAIACVQCNQKKGAMPIEDFLKKKPALLAQIRKQLKTTLRDAAAVNATRWSLFRSLQSTGCTVEVGSGAQTKFNRHAFSVPKEHWLDALCTGRIDGVADWEKLRPLQAYCIGRGSHKRTRTDKYGFPLCYFSRRKRPNDFGTGDYVRVKVTRGRNTGIWIGRATLTDGKLSVETKAGRVKATFLNSKCLFKSDGYKYQYL

SEQ ID NO: 24959 - protein, 470 aa, unidentified; identical to SEQ ID NO: 24835
  REGION 1..470: note = Human gut metagenome

SEQ ID NO: 24960 - protein, 422 aa, unidentified
  REGION 1..422: note = Bioreactor metagenome
MVYVIDIKGRPLMPTERHGKVRRLLRDGLARVVTRTPFTIQLLYETTPFVQPVTLGLDPGSKVAGLSASTKDRELLRVEASLRTDIVGLLSTRRELRRTRRSRMIRHRKARFDNRKKPDSWMAPSIEQRIDSHMKLVNKACTILPVSRIIVETAQFDIQLIKNPDLSGTDYQHGGQEGWKNVREYVLWRDGHRCRSCGGKSKDPVLEVHHIESRKTGGDSPDNLVTLCKACHERYHKGDLQLKLKRAPSLRDAAAVNIFRWEIYNRLVKAYGKDKVSLIYGYKTKDRRISLSLPKTSETDAFCIAGNLDASRCGLVKARFVARHCRSLHRQVTEKGGRRRSTIASHWIGKSYLQRFDTVKYQGKECIISGSTNGRPILRNIDWTKATDSPSVNPKQVKFLCRKHGSIIYETFSNKQIITCET

SEQ ID NO: 24961 - protein, 478 aa, unidentified
  REGION 1..478: note = Human gut metagenome
MTGNCTRSVKGKNKMPVCVLSANGERLMPTENYGKVRHLLKDGRAVIAKRNPFTIQLTCETSTYTQSIEMCVGTGYEHIGVSIKTKAKEVVSQQYDLLTNERSRHDDCRAYRQTRRNHLRYRAARFNNRVSSKKPGWIAPSLDNKVERHLDIISRYLSVMPVTDVFIKAATYDTQLLAALEAGEPVPQGKDYQHGPQYGFDTLREAVFERDHYTCVYCKRGLKDGAILHIHHAYYWKGLHGNSMRELATCCEKCNTPANHKEGGKLWGFDKPLRKYTGEAFMNSVRWILYQRAMARFQGAAEVHMTYGVISKRVRTDLGLPYSCATDAYCMGELRPEARCETEVFQKYRRNNRVLSKFYDAKYYDTREKGVIRSGNELSSGRTNRNHNLDGENLRRFRGCKKSKGRTSTRKQRYAMQPGDIVVYGNRKYVSKGCSSYGRALSLLTDGKPLVVSMKKIQLVRHKGGWVRLPQAAAGAKE

SEQ ID NO: 24962 - protein, 433 aa, Moorena sp.; identical to SEQ ID NO: 24648

SEQ ID NO: 24963 - protein, 453 aa, Lactobacillus sp.; identical to SEQ ID NO: 24548

SEQ ID NO: 24964 - protein, 416 aa, Moorena sp.; identical to SEQ ID NO: 24575

SEQ ID NO: 24965 - protein, 376 aa, unidentified
  REGION 1..376: note = Human gut metagenome
MVYVLDINGHPLMPTERHGKVKHLLKNGKAKVVKRCPFTIQLLYKSLTYTQSIILGVDAGSKHIGLSATTNDKEFYASDVELRTDIVKLISKRRELRRSRRNRKTRYRQARFDNRKRKDGWLAPSISQKIKCHIKVVENVHKILPITNIVVETASFDIQKIKNPNIKDTEYQQGEQLDFWNVREYVLFRDEHICQCCKGKTKDKILNVHHIESRKTGGNAPNNLITLCETCHKGYHNGTVRLPKTIKRGIIFRDAAFMGIMRWAFYNKLREKYKNVSMTYGYITKNTRIENKLPKKHYVDARCISGHPLAKPSEMIYYQKKIRCHNRQLFKINTLKGGTRKRNQSERVIKGYILFDKVKYQGKEYFVFGRRISGFF

SEQ ID NO: 24966 - protein, 483 aa, Moorena sp.; identical to SEQ ID NO: 24807

SEQ ID NO: 24967 - protein, 417 aa, unidentified; identical to SEQ ID NO: 24686
  REGION 1..417: note = Human gut metagenome

SEQ ID NO: 24968 - protein, 448 aa, Lactobacillus sp.; identical to SEQ ID NO: 24592

SEQ ID NO: 24969 - protein, 433 aa, unidentified
  REGION 1..433: note = Human gut metagenome
MQSHIRAFVLDKDRKPLMPCHAAKARKLLKKGKAAVFRRFPFTIILKERTREASAIQDVLVKVDPGSKSTGLAVVRKDEKNLHHALAFICLNHRGSKIRDALTSRRQLRRGRRSRNLRYRAPRFLNRKKPKGWLAPSLQHRVDAVMSWMNRLTRLVPVAGFVQELVKFDTQLMQNAAISGVEYQQGELAGYELKEYLLEKFDRKCVYCGKSGVVLNVEHIIPKARGGSNRVSNLAIACTQCNQKKGAMPIEDFLKKKPALLAQIRKQLKTPLRDATAVNATRWALYRNLQATGCTVEVGSGALTKFNRHAFSVPKEHWLDALCAGRIDGVADWENLRPLQAYCIGRGSHKRTRTDKYGFPLCYFSRYKRPNDFGTGDYVRVKVTRGRNTGIWIGRATLTDGKLSVETKAGRVKATFLNSKCLFKSDGYKYQYL

SEQ ID NO: 24970 - protein, 392 aa, Alicyclobacillus sp.; identical to SEQ ID NO: 24863

SEQ ID NO: 24971 - protein, 478 aa, unidentified
  REGION 1..478: note = Human gut metagenome
MTGNCTRSVKGKNKMPVCVLSANGERLMPTENYGKVRHLLKDGRAVIAKRNPFTIQLTYDTSTYTQPIEMCVGTGYEHIGVSIKTKAKEVVSQQYDLLTNERSRHDDCRAYRRTRRNRLRYRAARFNNRVSSKKPGWIAPSLDNKVERHLDIISRYLSVMPVKDVFIKAATYDTQLLAALEAGEPVPQGKDYQHGPQYGHDTLREAVFERDHYTCVYCKRGLKDGAILHVHHAYYWKGLHGNSMRELATCCEKCNTPANHKEGGKLWGFDKPLRKYTGEAFMNSVRWILYQRAMARFQGAAEVHMTYGVISKRVRTDLGLPYSCATDAYCMGELRPEARCETEVFQKYRRNNRVLSKFYDAKYYDTREKGVIRSGNELSSGRTNRNHNLDGENLRRFRGCKKSKGRTSTRKQRYAMQPGDIVVYGNRKYVSKGCSSYGRALSLLTDGKPLMVSTKKIQLVRHKGGWVRLPQAAVGAKE

SEQ ID NO: 24972 - protein, 478 aa, unidentified; identical to SEQ ID NO: 24531
  REGION 1..478: note = Human gut metagenome

SEQ ID NO: 24973 - protein, 336 aa, unidentified
  REGION 1..336: note = Human gut metagenome
MAVCVLSANGERLMPTENYGKVRHLLKDGRAVIAKRNPFTIQLTYDTSTYTQPIEMCVGTGYEHIGVSIKTKAKEVVSQQYDLLTNERSRHDDCRAYRRTRRNRLRYRAARFNNRVSSKKPGWIAPSLDNKVERHLDIISRYLSVMPVKDVFIKAATYDTQLLAALEAGEPVPQGKDYQHGPQYGHDTLREAVFERDHYTCVYCKRGLKDGAILHVHHAYYWKGLHGNSMRELATCCEKCNTPANHKEGGKLWGFDKPLRKYTGEAFMNSVRWILYQRAMARFQGAAEVHMTYGVISKRVRTNLGLPYSCATDAYCMGELRPEARCETEVFQKYRR

SEQ ID NO: 24974 - protein, 478 aa, unidentified; identical to SEQ ID NO: 24568
  REGION 1..478: note = Human gut metagenome

SEQ ID NO: 24975 - protein, 323 aa, unidentified
  REGION 1..323: note = Human gut metagenome
LVQCWYVTLARGTLRQRSILWNRLLPDSRKGKDFFMQPHIRAFVLDKDRKPLMPCHAARARKLLKKGKAAVFRRFPFTIILKERTREASAVQDVLVKIDPGSKSTGIAVVRKDKKDVHHALAFICLNHRGSKIRDALTSRRQLRRGRRSRNLRYRAPRFLNRTKPQGSLAPSLRHRVDTVMSWMNRLTRLVPVTGFVQELVKFDTQLMQNAAISGVEYQQGELAGYELKEYLLEKFDRKCVYCGKSGVVLNVEHIIPKARGGSNRVSNIAIACVQCNQKKGAMPIEDFLKKKPALLAQIRKQLKTTLRDAGAGHAARWALQQR

SEQ ID NO: 24976 - protein, 500 aa, unidentified; identical to SEQ ID NO: 24707
  REGION 1..500: note = Human gut metagenome

SEQ ID NO: 24977 - protein, 464 aa, unidentified
  REGION 1..464: note = Human gut metagenome
MPVCVLSANGERLMPTENYGKVRHLLKDGRAVIAKRNPFTIQLTYDTSTYTQPIELCVGTGYEHIGVSIKTKAKEVVSQQYDLLTNERSRHDDCRAYRRTRRNHLRYRAARFNNRVSGKKPGWIAPSLDNKVERHLDIISRYLSVMPVTDVFIKAATYDTQLLAALEAGEPVPQGKDYQHGPQYGYDTLREAVFERDHYTCVYCKRGLKDGAILHVHHAYYWKGLHGNSMRELATCCEKCNTPANHKEGGKLWGFDKPLRKYTGEAFMNSVRWILYQRAMARFQGAAEVHMTYGVISKRVRTDLGLPYSCATDAYCMGELRPEARCETEAFQKYRRNNRVLSKFYDAKYYDTREKGVIRSGNELSSGRTNRNHNLDGENLRRFRGCKKSKGRTSTRKQRYAMQPGDIVVYGNRKYVSKGCSSYGRALSLLTDGKPLMVSMKKIQLVRHKGGWVRLPQAAAEAKK

SEQ ID NO: 24978 - protein, 478 aa, unidentified
  REGION 1..478: note = Human gut metagenome
MTGNCTRSVKGKNKMPVCVLSANGERLMPTENYGKVRHLLKDGRAVIAKRNPFTIQLTYDTSTYTQPIEMCVGTGYEHIGVSIKTKAKEVVSQQYDMLTNERSRHDDCRAYRRTRRNRLRYRAARFNNRVSGKKPGWIAPSLDNKVERHLDIISRYLSVMPVTDVFIKAATYDTQLLAALEAGEPVPQGKDYQHGPQYGYDTLREAVFERDHYTCVYCKRGLKDGAILHVHHAYYWKGLHGNSMRELATCCEKCNTPANHKEGGKLWGFDKPLRKYTGEAFMNSVRWILYQRAMARFQGVAEVHMTYGVISKRVRTNLGLPYSCATDAYCMGELRPEARCETEVFQKYRRNNRVLSKFYDAKYYDTREKGVIRSGNELSSGRTNRNHNLDGENLRRFRGCKKSKGRTSTRKQRYAMQPGDIVVYGNRKCVSKGCSSYGRALSLLTDGKPLMVSMKKIQLVRHKGGWVRLPHAAAEAKK

SEQ ID NO: 24979 - protein, 417 aa, unidentified; identical to SEQ ID NO: 24686
  REGION 1..417: note = Human gut metagenome

SEQ ID NO: 24980 - protein, 452 aa, Moorena sp.; identical to SEQ ID NO: 24570

SEQ ID NO: 24981 - protein, 478 aa, unidentified; identical to SEQ ID NO: 24531
  REGION 1..478: note = Human gut metagenome

SEQ ID NO: 24982 - protein, 430 aa, unidentified
  REGION 1..430: note = Human gut metagenome
MTGNCTRSVKGKNKMPVCVLSANGERLMPTENYGKVRHLLKDGRAVIAKRNPFTIQLTYDTSTYTQPIEMCVGTGYEHIGVSIKTKAKEVVSQQYDMLTNERSRHDDCRAYRRTRRNRLRYRAARFNNRVSGKKPGWIAPSLDNKVERHLDIISRYLSVMPVTDVFIKAATYDTQLLAALEAGEPVPQGKDYQHGPQYGYDTLREAVFERDHYTCVYCKRGLKDGAILHVHHAYYWKGLHGNSMRELATCCEKCNTPANHKEGGKLWGFDKPLRKYTGEAFMNSVRWILYQRAMARFQGVAEVHMTYGVISKRVRTNLGLPYSCATDAYCMGELRPEARCETEVFQKYRRNNRVLSKFYDAKYYDTREKGVIRSGNELSSGRTNRNHNLDGENLRRFRGCKKSKGLKKIQLVRHKGGWVRLPQAAAGAKE

SEQ ID NO: 24983 - protein, 353 aa, unidentified; identical to SEQ ID NO: 24789
  REGION 1..353: note = Human gut metagenome

SEQ ID NO: 24984 - protein, 464 aa, unidentified; identical to SEQ ID NO: 24525
  REGION 1..464: note = Human gut metagenome

SEQ ID NO: 24985 - protein, 443 aa, unidentified
  REGION 1..443: note = Human gut metagenome
VRHLLKDGRAVIAKRNPFTIQLTYDTSTYTQPIEMCVGTGYEHIGVSIKTKAKEVVSQQYDMLTNERSRHDDCRAYRRTRRNRLRYRAARFNNRVSGKKPGWIAPSLDNKVERHLDIISRYLSVMPVTDVFIKAATYDTQLLAALEAGEPVPQGKDYQHGPQYGYDTLREAVFERDHYTCVYCKRGLKDGAILHVHHAYYWKGLHGNSMRELATCCEKCNTPANHKEGGKLWGFDKPLRKYTGEAFMNSVRWILYQRAMARFQGVAEVHMTYGVISKRVRTNLGLPYSCATDAYCMGELRPEARCETEVFQKYRRNNRVLSKFYDAKYYDTREKGVIRSGNELSSGRTNRNHNLDGENLRRFRGCKKSKGRTSTRKQRYAMQPGDIVVYGNRKYVSKGCSSYGRALSLLTDGKPLMVSMKKIQLVRHKGGWVRLPHAAAEAKK

SEQ ID NO: 24986 - protein, 464 aa, unidentified
  REGION 1..464: note = Human gut metagenome
MPVCVLSANGERLMPTENYGKVRHLLKDGRAVIAKRNPFTIQLTYETSTYTQPIELCVGTGYEHIGVSIKTKAKEVISQQYDLLTNERSRHDDCRAYRRTRRNRLRYRAARFNNRVSGKKPGWIAPSLDNKVERHLDIISRYLSVMPVTDVFIKAATYDTQLLAALEAGEPVPQGKDYQHGPQYGYDTLREAVFERDHYTCVYCKRGLKDGAILHVHHAYYWKGLHGNSMRELATCCEKCNTPANHKEGGKLWGFDKPLRKYTGEAFMNSVRWILYQRAMARFQGVAEVHMTYGVISKRVRTNLGLPYSCATDAYCMGELRPEARCETEVFQKYRRNNRVLSKFYDAKYYDTREKGVIRSGNELSSGRTNRNHNLDGENLRRFRGCKKSKGRTSTRKQRYAMQPGDIVVYGNRKYVSKGCSSYGRALSLLTDGKPLMVSMKKIQLVRHKGGWVRLPHAAAEAKK

SEQ ID NO: 24987 - protein, 478 aa, unidentified
  REGION 1..478: note = Human gut metagenome
MTGNCTRSVKGKNKMPVCVLSANGERLMPTENYGKVRHLLKEGRAVIAKRNPFTIQLTYETSTYTQSIEMCVGTGYEHIGVSIKTKAKEVVSQQYDLLTNERSRHDDCRVHRRTRRNHLRYRAARFNNRVSIRKPGWIAPSLDNKVERHLDIISRYLSVMPVTDVFIKAATYDTQLLAALEAGEPVPQGKDYQHGPQYGHDTLREAVFERDHYTCVYCKRGLKDGAILHVHHAYYWKGLHGNSMRELATCCEKCNTPANHKEGGKLWGFDKPLRKYTGEAFMNSVRWILYQRAMARFQGVAEVHMTYGVISKRVRTNLGLPYSCATDAYCMGELRPEARCETEVFQKYRRNNRVLSKFYDAKYYDTREKGVIRSGNELSSGRTNRNHNLDGENLRRFRGCKKSKGRTSTRKQRYAMQPGDIVVYGNRKYVSKGCSSYGRALSLLTDGKPLMVSMKKIQLVRHKGGWVRLPHAAAEAKK

SEQ ID NO: 24988 - protein, 464 aa, unidentified; identical to SEQ ID NO: 24525
  REGION 1..464: note = Human gut metagenome

SEQ ID NO: 24989 - protein, 443 aa, unidentified
  REGION 1..443: note = Human gut metagenome
MMKVFVLDKDHKPLMPCGPARARKLLKAGRARVHKLQPFTIRIVDRSLADSVVQKVVVKVDPGSKETGIAVVREDEEETHHALYFINLKHRGAAIRDALTSRRQLRRGRRSRNLRYRAPRFLNRSQQKGWLPPSLQHRVDTTLSWVNRLRRLAPVSGIAQELVKFDTQLMQNPDISGVEYQQGELAGYELKEYLLEKFGRRCVYCAKSGVPLNVEHIVPKARGGSNRLSNLAIACVECNQKKGARPIEEFLKEKPELLARIRKRLKTPLRDAASVNATRWALFEALRATGLPIRTGSGALTKFNRHCFGVPKEHWFDALCVGRINGVSYEPGMKVLNVSCTGRGQYKRTRTDKFGFPICHFMRTKRPHGVGLGDLVRMTVQKGKHPGIWTGRAFPSNDGRVVLILPEFRIWGRARNCSILSLSDGYGYRLTDSETTKPTSFGK

SEQ ID NO: 24990 - protein, 453 aa, Lactobacillus sp.; identical to SEQ ID NO: 24539

SEQ ID NO: 24991 - protein, 464 aa, unidentified; identical to SEQ ID NO: 24986
  REGION 1..464: note = Human gut metagenome

SEQ ID NO: 24992 - protein, 478 aa, unidentified; identical to SEQ ID NO: 24531
  REGION 1..478: note = Human gut metagenome

SEQ ID NO: 24993 - protein, 417 aa, unidentified; identical to SEQ ID NO: 24686
  REGION 1..417: note = Human gut metagenome

SEQ ID NO: 24994 - protein, 389 aa, unidentified
  REGION 1..389: note = Human gut metagenome
MAVVGNDREYYASESIRKSEKDRITARRGYWRTRRNRLRYRKPRFDNRRRKAGWLAPSVQHRLEFTVREIQRLYRFLPISQLVVEVSPFDNQKLANPAIKPWEYTQGKMHGYQTVKDYLLVRDHNRDALDGQVYPASQLRVHHLVQHKDGGTNQPDNLVLLSDVHHNQANHVNGTLTKLAANRQRTIDYRGVYFMSLLASRLNHYFPNYVQTQGYLTANLRFRYGITKSHLNDAFVIAGGTDQYTRTGNVYRREKLRCNNRSLQKFYDAKYIDRRDDKKKAGKELSSGRTKRSRELNYDNQRIYRLRKVSKGRISIRRQHYRLRPHDIVFNMKIKQTEFVKGVISNGKSVLLQNGHTVTPQKLVCLHHVNGILTVKVPLVLDDGFISHD

SEQ ID NO: 24995 - protein, 433 aa, unidentified; identical to SEQ ID NO: 24888
  REGION 1..433: note = Human gut metagenome

SEQ ID NO: 24996 - protein, 522 aa, unidentified; identical to SEQ ID NO: 24654
  REGION 1..522: note = Human gut metagenome

SEQ ID NO: 24997 - protein, 478 aa, unidentified
  REGION 1..478: note = Human gut metagenome
MTGNCTRSVKGKNKMPVCVLSANGERLMPTENYGKVRHLLKDGRAVIAKRNPFTIQLTYDTSTYTQPIEMCVGTGYEHIGVSIKTKAKEVVSQQYDMLTNERSRHDDCRAYRRTRRNRLRYRAARFNNRVSGKKPGWIAPSLDNKVERHLDIISRYLSVMPVTDVFIKAATYDTQLLAALEAGEPVPQGKDYQHGPQYGYDTLREAVFERDHYTCVYCKRGLKDGAILHVHHAYYWKGLHGNSMRELATCCEKCNTPANHKEGGKLWGFDKPLRKYTGEAFMNSVRWILYQRAMARFQGVAEVHMTYGVISKRVRTNLGLPYSCATDAYCMGELRPESRCETEVFQKYRRNNRVLSKFYDAKYYDTREKGVIRSGNELSSGRTNRNHNLDGENLRRFRGCKKSKGRISTRKQRYAMQPGDIVVYGNRKYVSKGCSSYGRALSLLTDGKPLMVSMKKIQLVRHKGGWVRLPHAAAEAKK

SEQ ID NO: 24998 - protein, 478 aa, unidentified; identical to SEQ ID NO: 24531
  REGION 1..478: note = Human gut metagenome

SEQ ID NO: 24999 - protein, 464 aa, unidentified
  REGION 1..464: note = Human gut metagenome
MAVCVLSANGERLMPTENYGKVRHLLKDGRAVIAKRNPFTIQLTYDTSTYTQPIEMCVGTGYEHIGVSIKTKAKEVVSQQYDLLTNERSRHDDCRAYRRTRRNRLRYRAARFNNRVSSKKPGWIAPSLDNKVERHLDIISRYLSVMPVKDVFIKAATYDTQLLAALEAGEPVPQGKDYQHGPQYGHDTLREAVFERDHYTCVYCKRGLKDGAILHVHHAYYWKGLHGNSMRELATCCEKCNTPANHKEGGKLWGFDKPLRKYTGEAFMNSVRWILYQRAMARFQGAAEVHMTYGVISKRVRTDLGLPYSCATDAYCMGELRPEARCDTEVFQKYRRNNRVLSKFYDAKYYDTREKGVIRSGNDLSSGRTNRNHNLDGENLRRFRGCKKSKGRTSTRKQRYAMQPGDIVVYGNRKYVSKGCSSYGRALSLLTDGKPLMVSTKKIQLVRHKGGWVRLPQAAVGAKE

SEQ ID NO: 25000 - protein, 478 aa, unidentified; identical to SEQ ID NO: 24653
  REGION 1..478: note = Human gut metagenome

SEQ ID NO: 25001 - protein, 436 aa, Moorena sp.
MNRVFVLGSTKKPLMPCHPARARELLRKGKAAVFRMEPFTIILSGREDGEVQDIEFKASPGGKATGIALVGLFRSGARLLFGAEIAHRGAAVRASLDSRRSLRHGRRGRKTRYRQPRPNFAKRSRRANCGGKWLPPSIKSRVDNAAVWSARLARLAPVACAHVETVRFDTQKLQNPEISGIEYQQGTLAGYEVREYLLEKFKRTCAYCGKQGIPLQIEHIQPIALGGTGRVSNLAIACRPCNEKKAAQPVAQFLADRPDVLKKIKAQAKAPLLSDVAALNAARFALGNEIGASGLDTRRWSHGRTKLNRTAQGYAWGKWADAACVGESGAAVYIPANFRPLSIKATGRGTRQVVRTDKYGFPRGAAGRCKRVQGFQTGDLVRLVQPKGKYAGTHVGRLAGVRADGRFDIRADGQKITSGHQNFSLIQRGDGYEYRH

SEQ ID NO: 25002 - protein, 433 aa, Moorena sp.
MINVFVLDKDHKPLMPCRPARARRLLRAGRARVHKLYPFTIRIVDRTLAESAVQPVRIKLDPGSKETGIAVVREDEKKTHHALYFINLRHRGASIRDALTARRKLRRGRRSRNLRYRAPRFLNRRRPEGWLPPSLQHRVDTTKSWVDRLRRLVPASGLAEELVKFDTQKLQNPEISGTEYQQGELAGYELREYLLEKFGRRCVYCGKSGVPLNVEHIVPKARGGSNRVSNLAIACVECNQKKGARPIEDFLKGKPELLTRIRRQLRTPLRDASAVNATRWALFNALKATGLPVAVGSGALTKLNRRLCGVPKEHWLDALCAGETRGAVFDERMQILEVYCAGRGQYKRTRTARYGFPVAYFMRTKRPHGVGTGDIVRMSVRGGKHPGLWTGRAAAKNSGAVVLQMPEFQIGGRAKNCTILARNDGYGYSLTNS

SEQ ID NO: 25003 - protein, 478 aa, unidentified; identical to SEQ ID NO: 24531
  REGION 1..478: note = Human gut metagenome

SEQ ID NO: 25004 - protein, 500 aa, unidentified; identical to SEQ ID NO: 24937
  REGION 1..500: note = Human gut metagenome

SEQ ID NO: 25005 - protein, 478 aa, unidentified; identical to SEQ ID NO: 24701
  REGION 1..478: note = Human gut metagenome

SEQ ID NO: 25006 - protein, 464 aa, unidentified; identical to SEQ ID NO: 24525
  REGION 1..464: note = Human gut metagenome

SEQ ID NO: 25007 - protein, 478 aa, unidentified; identical to SEQ ID NO: 24594
  REGION 1..478: note = Human gut metagenome

SEQ ID NO: 25008 - protein, 464 aa, unidentified; identical to SEQ ID NO: 24525
  REGION 1..464: note = Human gut metagenome

SEQ ID NO: 25009 - protein, 417 aa, unidentified; identical to SEQ ID NO: 24686
  REGION 1..417: note = Human gut metagenome

SEQ ID NO: 25010 - protein, 478 aa, unidentified; identical to SEQ ID NO: 24531
  REGION 1..478: note = Human gut metagenome

SEQ ID NO: 25011 - protein, 470 aa, unidentified
  REGION 1..470: note = Human gut metagenome
MTGNCTRSVKGKNKMPVCVLSANGERLMPTENYGKVRHLLKDGRAVIAKRNPFTIQLTYDTSTYTQPIEMCVGTGYEHIGVSIKTKAKEVVSQQYDMLTNERSRHDDCRAYRRTRRNRLRYRAARFNNRVSGKKPGWIAPSLDNKVERHLDIISRYLSVMPVTDVFIKAATYDTQLLAALEAGEPVPQGKDYQHGPQYGYDTLREAVFERDHYTCVYCKRGLKDGAILHVHHAYYWKGLHGNSMRELATCCEKCNTPANHKEGGKLWGFDKPLRKYTGEAFMNSVRWILYQRAMARFQGVAEVHMTYGVISKRVRTNLGLPYSCATDAYCMGELRPEARCETEVFQKYRRNNRVLSKFYDAKYYDTREKGVIRSGNELSSGRTNRNHNLDGENLRRFRGCKKSKGRTSTRKQRYAMQPGDIVVYGNRKYVSKGCSSYGRALSLLTDGKPLMVSMKKIQLVRHKGGWVRLP

SEQ ID NO: 25012 - protein, 453 aa, Lactobacillus sp.; identical to SEQ ID NO: 24539

SEQ ID NO: 25013 - protein, 433 aa, unidentified; identical to SEQ ID NO: 24672
  REGION 1..433: note = Human gut metagenome

SEQ ID NO: 25014 - protein, 362 aa, unidentified
  REGION 1..362: note = Human gut metagenome
MPVCVLSANGERLMPTENYGKVRHLLKDGRAVIAKRNPFTIQLTYETSTYTQPIELCVGTGYEHIGVSIKTKAKEVVSQQYDLLTNERSRHDDCRAYRRTRRNRLRYRAARFNNRVSGKKPGWIAPSLDNKVERHLDIISRYLSVMPVTDVFIKAATYDTQLLAALEAGEPVPQGKDYQHGPQYGFDTLREAVFERDHYTCVYCKRGLKDGAILHVHHAYYWKGLHGNSMRELATCCEKCNTPANHKEGGKLWGFDKPLRKYTGEAFMNSVRWILYQRATARFQGAAEVHMTYGVISKRVRTNLGLPYSCATDAYCMGELRPEARCETEVFQKYRRNNRVLSKFYDAKYYDTREKGVVRSGN

SEQ ID NO: 25015 - protein, 547 aa, unidentified
  REGION 1..547: note = Human gut metagenome
RPPPNDRELYRTIKLQSGLVDVPHQMTGSYTENMERIIGVSVDVPHQMTGSYTAAPPQTEHHAVDVPHRMTGNCTRSVKGKNKMPVCVLSANGERLMPTENYGKVRHLLKDGRAVIAKRNPFTIQLTYDTSTYTQPIEMCVGTGYEHIGVSIKTKAKEVVSQQYDMLTNERSRHDDCRAYRRTRRNRLRYRAARFNNRVSGKKPGWIAPSLDNKVERHLDIISRYLSVMPVTDVFIKAATYDTQLLAALEAGEPVPQGKDYQHGPQYGYDTLREAVFERDHYTCVYCKRGLKDGAILHVHHAYYWKGLHGNSMRELATCCEKCNTPANHKEGGKLWGFDKPLRKYTGEAFMNSVRWILYQRAMARFQGVAEVHMTYGVISKRVRTNLGLPYSCATDAYCMGELRPEARCETEVFQKYRRNNRVLSKFYDAKYYDTREKGVIRSGNELSSGRTNRNHNLDGENLRRFRGCKKSKGRTSTRKQRYAMQPGDIVVYGNRKYVSKGCSSYGRALSLLTDGKPLMVSMKKIQLVRHKGGWVRLPHAAAEAKK

SEQ ID NO: 25016 - protein, 430 aa, unidentified; identical to SEQ ID NO: 24982
  REGION 1..430: note = Human gut metagenome

SEQ ID NO: 25017 - protein, 401 aa, unidentified
  REGION 1..401: note = metagenome
MTGNCTRSVKGKNKMPVCVLSANGERLMPTENYGKVRHLLKDGRAVIAKRNPFTIQLTYDTSTYTQPIEMCVGTGYEHIGVSIKTKAKEVVSQQYDMLTNERSRHDDCRAYRRTRRNRLRYRAARFNNRVSGKKPGWIAPSLDNKVERHLDIISRYLSVMPVTDVFIKAATYDTQLLAALEAGEPVPQGKDYQHGPQYGYDTLREAVFERDHYTCVYCKRGLKDGAILHVHHAYYWKGLHGNSMRELATCCEKCNTPANHKEGGKLWGFDKPLRKYTGEAFMNSVRWILYQRAMARFQGVAEVHMTYGVISKRVRTNLGLPYSCATDAYCMGELRPEARCETEVFQKYRRNNRVLSKFYDAKYYDTREKGVIRSGNELSSGRTNRNHNLDGENLRRFRGCK

SEQ ID NO: 25018 - protein, 527 aa, unidentified
  REGION 1..527: note = Viral metagenome
MLPQSPALESTSADKPGVGTKRGVDARSQIRATGVQHGRGETSQTVTSDEKHHSARTASAGQAEDRGLATPYNIVVPNIAVPKRTAQHVFVLDKHGQPLQPCRPARARKLLADGRARVHRLVPFVIRLVDREVADSQVLGVEVGIAPGSKVTGVSVFTNNQGGREGLVSIEIGHRGQQIHKKMQQRANYRRRRRSANLRYRAPRFNNRTRPSGWLAPSLRHRVDSTMAMVARLRRWAPVTAIHQELVRFDMQKMQNPEISGVEYQQGELFGYEVREYLLEKWERKCAYCGATHTPLNIDHIRPRSSGGSNRVSNLTLACIPCNQSKSSNPVEEFLVNKPEVLKKILARAKAPLKDAAAVNSTRWALYQALKGSGLPVLVGSGGRTKWNRSRFGLAKSHTLDALCVGEVDAVAAVPKTILVAECMGRGSYSRTRTDKYGFPRLYLPRTKQVHGFATGDLVRAVIPKGKHAGVHVGRVAVRSRGWFRVGTVDCSWQHCTLLQRADGYEYERREEVPFPSRLQAGVPTAP

SEQ ID NO: 25019 - protein, 460 aa, unidentified; identical to SEQ ID NO: 24549
  REGION 1..460: note = Human gut metagenome

SEQ ID NO: 25020 - protein, 478 aa, unidentified; identical to SEQ ID NO: 24531
  REGION 1..478: note = Human gut metagenome

SEQ ID NO: 25021 - protein, 453 aa, Lactobacillus sp.; identical to SEQ ID NO: 24539

SEQ ID NO: 25022 - protein, 464 aa, unidentified
  REGION 1..464: note = Human gut metagenome
MMPTQKQKQVNYVYVVDANGTPVMPTSRLGMVRRWLKSGQAVWYGNSRTTIQFVRPIDTQTQPLTLGVNTGFHLGMAVVGNDREYYASESIRKSEKDRITARREYRRTRRNRLRYRKPRFDNRRRKAGWLAPSVQHRLEFTVREIQRLYRFLPISQLVVEVSPFDNQKLANPAIKPWEYTQGKMHGYQTVKDYLLVRDHNRDALDGQVYPASQLRVHHLAQHKDGGTNQPDNLVLLSDVHHNQANHVNGTLTKLAANRQRTIDYRGVYFMSLLASRLNHYFPNYVQTQGYLTANLRFRYGITKSHLNDAFVIAGGTDQYTRTGNVYRREKLRCNNRSLQKFYDAKYIDRRDDKKKAGKELSSGRTKRSRELNYDNQRIYRLRKVSKGRISIRRQHYRLRPHDIVFNMKIKQTEFVKGVISNGKSVLLQNGHTVTPQKLVCLHHVNGILTVKVPLVLDDGLISHD

SEQ ID NO: 25023 - protein, 464 aa, unidentified; identical to SEQ ID NO: 24793
  REGION 1..464: note = gut metagenome

SEQ ID NO: 25024 - protein, 464 aa, unidentified; identical to SEQ ID NO: 24576
  REGION 1..464: note = Human gut metagenome

SEQ ID NO: 25025 - protein, 478 aa, unidentified; identical to SEQ ID NO: 24701
  REGION 1..478: note = Human gut metagenome

SEQ ID NO: 25026 - protein, 551 aa, Moorena sp.
MLVHVLNKDGKALMPCHPAKARILLRERKAKPVKGKTGYFTIQLLYGSSGYKQDIVVGIDTGAKRVPIAAVGNSRVYYAKEKILRTDVKKQLSDRARYRRTRRSRKTRYRKPRFLNRVKTKCARCGVNNVPKRWKKVKRKRGKSLKKVCNGRAQLCRPCQGKKGQPLAEGVGERSEHNKPHILAPSVFNRAESILNDVHKLSQTLPISRIVVEIASFDTQKMASALIEGVEYQHGTLFGYEIKQYLLTVHKHKCAYCGGLSGDNVLQVEHIHPQSKGGTDKVSNLTISCRVCNEAKGSLTLDQWERVLRSSPSEIEEKRLKNIPAIKKQSKLKKGFQYSALTQSYKNYLLSELVSILGFDTLPHFVPNPQPALLNPSRKDFVVEVTFGAKTKYHRNQLGLPKSQINDAFVIASEGKSFRMPKLYILEKQVKKRYPHDYISPHKKGQPIVKSKREPEIFGFRLWDKVKCKHSKNGEVVGYIQGRRSSGSFAIASLDGDLLIGGITYKKLTKLRKAESNYIRERIRQLFLSDFPNQTGYPCRKTVKNVYQKTF

SEQ ID NO: 25027 - protein, 385 aa, unidentified
  REGION 1..385: note = Human gut metagenome
QYDMLTNERSRHDDCRAYRRTRRNRLRYRAARFNNRVSGKKPGWIAPSLDNKVERHLDIISRYLSVMPVTDVFIKAATYDTQLLAALEAGEPVPQGKDYQHGPQYGYDTLREAVFERDHYTCVYCKRGLKDGAILHVHHAYYWKGLHGNSMRELATCCEKCNTPANHKEGGKLWGFDKPLRKYTGEAFMNSVRWILYQRAMARFQGVAEVHMTYGVISKRVRTNLGLPYSCATDAYCMGELRPEARCETEVFQKYRRNNRVLSKFYDAKYYDTREKGVIRSGNELSSGRTNRNHNLDGENLRRFRGCKKSKGRTSTRKQRYAMQPGDIVVYGNRKYVSKGCSSYGRALSLLTDGKPLMVSMKKIQLVRHKGGWVRLPHAAAEAKK

SEQ ID NO: 25028 - protein, 464 aa, unidentified; identical to SEQ ID NO: 24525
  REGION 1..464: note = Human gut metagenome

SEQ ID NO: 25029 - protein, 416 aa, Moorena sp.; identical to SEQ ID NO: 24575

SEQ ID NO: 25030 - protein, 433 aa, unidentified
  REGION 1..433: note = Human gut metagenome
MQPHIRAFVLDKDRKPLMPCHAAKARKLLKKGKAAVFRRFPFTIILKERTREASAIQDVLVKVDPGSKSTGLAVVRKDEKNLHHALAFICLNHRGSKIRDALTSRRQLRRGRRSRNLRYRAPRFLNRTKPQGSLAPSLRHRVDTVMSWMNRLTRLVPVTGFVQELVKFDTQLMQNAAISGVEYQQGELAGYELKEYLLEKFDRKCVYCGKSGVVLNVEHIIPKARGGSNRVSNIAIACVQCNQKKGAMPIEDFLKKKPALLAQIRKQLKTPLRDATAVNATRWALYRNLQATGCTVEVGSGALTKFNRHAFSVPKEHWLDALCAGRIDGVADWEKLRPLQAYCIGRGSHKRTRTDKYGFPLCYFSRRKRPNDFGTGDYVRVKVTRGRNAGIWTGRATLTDGKLSVETKAGRVKATFLNSKCLFKSDGYKYQYL

SEQ ID NO: 25031 - protein, 491 aa, Moorena sp.; identical to SEQ ID NO: 24890

SEQ ID NO: 25032 - protein, 478 aa, unidentified; identical to SEQ ID NO: 24531
  REGION 1..478: note = Human gut metagenome

SEQ ID NO: 25033 - protein, 402 aa, Lactobacillus sp.
MMPTQKQKQVNYVYVVDANGTPVMPTSRLGMVRRWLKSGQAVWYGNSRTTIQFVRPIDTQTQPLTLGVNTGFHLGMAVVGNDREYYASESIRKSEKDRITARREYRRTRRNRLRYRKPRFDNRRRKAGWLAPSVQHRLEFTVREIQRLYRFLPISQLVVEVSPFDNQKLANPAIKPWEYTQGKMHGYQTVKDYLLVRDHNRDALDGQVYPASQLRVHHLVQHKDGGTNQPDNLVLLSDVHHNQANHVNGTLTKLAANRQRTIDYRGVYFMSLLASRLNHYFPNYVQTQGYLTANLRFRYGITKSHLNDAFVIAGGTDQYTRTGNVYRREKLRCNNRSLQKFYDAKYIDRRDDKKKAGKELSSGRTKRSRELNYDNQRIYRLRKVSKGRISIRRQHYRLRPHD

SEQ ID NO: 25034 - protein, 478 aa, unidentified; identical to SEQ ID NO: 24531
  REGION 1..478: note = Human gut metagenome

SEQ ID NO: 25035 - protein, 453 aa, Lactobacillus sp.; identical to SEQ ID NO: 24539

SEQ ID NO: 25036 - protein, 430 aa, unidentified
  REGION 1..430: note = Candidate division MSBL1 archaeon
MSQKVYVRNMRGEPLMPTNPAKARHLLDDDRAEVVKRKPFTIRLKYPTGENGQEVTLGVDAGYSTVGFSAVTEDEELIRGELDLRDDVSDRLRRRADYRRNRRSRKTRYREPRFDNRGKEDGWLAPSIKYKMSDHLQLVEMIGELLPVTRTVIEVATFDTEKLANPELDGTEYVPETFRGYEVKEYLLAKWGRRCVYCGAEDVPLEVDHIVPKSRGGSDRVDNLTISCVDCNREKGDRTAEEYGYPEVQRKAGESLKETAFMNIVRWKIVNKLDCDHTYGYRTKERRIDLGLEKSDDNDAFVIAGGGDQKRTGPYRVTRGRRNNRKLEINRRGHGRSVRRERYEFQPGDLVRGDDALYRVRGSCSYGRYVRAFDEERNEEYLRADSLKLVKYGKGLCWREKTSRNSSPTESEDSKGVSSRQPDGMAERLR

SEQ ID NO: 25037 - protein, 478 aa, unidentified; identical to SEQ ID NO: 24531
  REGION 1..478: note = Human gut metagenome

SEQ ID NO: 25038 - protein, 500 aa, unidentified
  REGION 1..500: note = Human gut metagenome
MTGSYTAAPPQTEHHAVDVPHRMTGNCTRSVKGKNKMPVCVLSANGERLMPTENYGKVRHLLKDGRAVIAKRNPFTIQLTYDTSTYTQPIEMCIGTGYEHIGVSIKTKAKEVVSQQYDMLTNERSRHDDCRAYRRPRRNRLRYRAARFNNRVSGKKPGWIAPSLDNKVERHLDIISRYLSVMPVTDVFIKAATYDTQLLAALEAGEPVPQGKDYQHGPQYGYDTLREAVFERDHYTCVYCKRGLKDGAILHVHHAYYWKGLHGNSMRELATCCEKCNTPANHKEGGKLWGFDKPLRKYTGEAFMNSVRWILYQRAMARFQGVAEVHMTYGVISKRVRTNLGLPYSCATDAYCMGELRPEARCETEVFQKYRRNNRVLSKFYDAKYYDTREKGVIRSGNELSSGRTNRNHNLDGENLRRFRGCKKSKGRTSTRKQRYAMQPGDIVVYGNRKYVSKGCSSYGRALSLLTDGKPLMVSMKKIQLVRHKGGWVRLPHAAAEAKK

SEQ ID NO: 25039 - protein, 463 aa, unidentified
  REGION 1..463: note = Human gut metagenome
MMPTQKQKQVNYVYVVDANGTPVMPTSRLGMVRRWLKSGQAVWYGNSRTTIQFVRPIDTQTQPLTLGVNTGFHLGMAVVGNDREYYASESIRKSEKDRITARREYWRTRRNRLRYRKPRFDNRRRKAGCSRRPFSIGSSLRFARFNACTGSCRSVSWSSRLVPSTTKNLPIPPSSRGNTRKEKCTAIKQLRIIYWSAIITVMPWMVKSTRLAATGAPPRSAQRRWHESADNLVLLSDVHHNQANHVNGTLTKLAANRQRTIDYRGVYFMSLLASRLNHYFPNYVQTQGYLTANLRFRYGITKSHLNDAFVIAGGTDQYTRTGNVYRREKLRCNNRSLQKFYDAKYIDRRDDKKKAGKELSSGRTKRSRELNYDNQRIYRLRKVSKGRISIRRQHYRLRPHDIVFNMKIKQTEFVKGVISNGKSVLLQNGHTVTPQKLVCLHHVNGILTVKVPLVLDDGFISHD

SEQ ID NO: 25040 - protein, 464 aa, unidentified
  REGION 1..464: note = Human gut metagenome
MPVCVLSANGERLMPTENYGKVRHLLKDGRAVIAKRNPFTIQLTYDTSTYTQPIELCVGTGYEHIGVSIKTKAKEVVSQQYDLLTNERSRHDDCRAYRRTRRNHLRYRAARFNNRVSGKKPGWIAPSLDNKVERHLDIISRYLSVMPVTDVFIKAATYDTQLLAALEAGEPVPQGKDYQHGPQYGYDTLREAVFERDHYTCVYCKRGLKDGAILHVHHAYYWKGLHGNSMRELATCCEKCNTPANHKEGGKLWGFDKPLRKYTGEAFMNSVRWILYQRAMARFQGAAEVHMTYGVISKRVRTDLGLPYSCATDAYCMGELRPEARCETEAFQKYRRNNRVLSKFYDAKYYDTREKGVIRSGNELSSGRTNRNHNLDGENLRRFRGCKKSKGRTSTRKQRYAMQPGDIVVYGNRKYVSKGCSSYGRALSLLTDGKPLMVSMKKIQLVRHKGGWVRLPHAAAEAKK

SEQ ID NO: 25041 - protein, 464 aa, unidentified; identical to SEQ ID NO: 24525
  REGION 1..464: note = Human gut metagenome

SEQ ID NO: 25042 - protein, 478 aa, unidentified; identical to SEQ ID NO: 24738
  REGION 1..478: note = Human gut metagenome

SEQ ID NO: 25043 - protein, 362 aa, unidentified
  REGION 1..362: note = Human gut metagenome
LARGTLRQRSILWNRLLPDSRKGKDFFMQPHIRAFVLDKDRKPLMPCHAARARKLLKKGKAAVFRRFPFTIILKERTREASAVQDVLVKIDPGSKSTGIAVVRKDKKDVHHALAFICLNHRGSKIRDALTSRRQLRRGRRSRNLRYRAPRFLNRTKPQGSLAPSLRHRVDTVMSWMNRLTRLVPVTGFVQELVKFDTQLMQNAAISGVEYQQGELAGYELKEYLLEKFDRKCVYCGKSGVVLNVEHIIPKARGGSNRVSNLAIACVQCNQKKGAMPIEDFLKKKPALLAQIRKQLKTTLRDAAPSMRRVGHSLGAFSQRDAPSKSAPAHRPSSIVTLSACRKSIGSMHYAPVASTAWPIGKN

SEQ ID NO: 25044 - protein, 477 aa, unidentified
  REGION 1..477: note = Human gut metagenome
MTGSYTRLREEKKMAVCVLSANGERLMPTENYGKVRHLLKEGRAVIAKRNPFTIQLTYETSTYTQSIEMCVGTGYEHIGVSIKTKAKEVVSQQYDLLTNERSRHDDCRVHRRTRRNHLRYRAARFNNRVSIRKPGWIAPSLDNKVERHLDIISRYLSVMPVTDVFIKAATYDTQLLAALEAGEPVPQGKDYQHGPQYGHDTLREAVFERDHYTCVYCKRGLKDGAILHVHHAYYWKGLHGNSMRELATCCEKCNTPANHKEGGKLWGFDKPLRKYTGEAFMNSVRWILYQRAMAHFQGAADIHMTYGVISKRVRTDLGLPYSCATDAYCMGELRPEARCETEVFQKYRRNNRVLSKFYDAKYYDTREKGVIRSGNELSSGRTNRNHNLDGENLRRFRGCKKSKGRTSTRKQRYALQPGDVVVFGNRKYVSKGCSSYGRELKLLTDGKPLVVSTKKIQLVRHKGGWVRLPQAAAGAKE

SEQ ID NO: 25045 - protein, 522 aa, unidentified; identical to SEQ ID NO: 24654
  REGION 1..522: note = Human gut metagenome

SEQ ID NO: 25046 - protein, 489 aa, unidentified
  REGION 1..489: note = Human gut metagenome
MTGSYTAAPPQTEHHAVDVPHRMTGNCTRSVKGKNKMPVCVLSANGERLMPTENYGKVRHLLKDGRAVIAKRNPFTIQLTYDTSTYTQPIEMCVGTGYEHIGVSIKTKAKEVVSQQYDMLTNERSRHDDCRAYRRTRRNRLRYRAARFNNRVSGKKPGWIAPSLDNKVERHLDIISRYLSVMPVTDVFIKAATYDTQLLAALEAGEPVPQGKDYQHGPQYGYDTLREAVFERDHYTCVYCKRGLKDGAILHVHHAYYWKGLHGNSMRELATCCEKCNTPANHKEGGKLWGFDKPLRKYTGEAFMNSVRWILYQRAMARFQGVAEVHMTYGVISKRVRTNLGLPYSCATDAYCMGELRPEARCETEVFQKYRRNNRVLSKFYDAKYYDTREKGVIRSGNELSSGRTNRNHNLDGENLRRFRGCKKSKGRTSTRKQRYAMQPGDIVVYGNRKYVSKGCSSYGRALSLLTDGKPLMVSMKKIQLVRHKGGWV

SEQ ID NO: 25047 - protein, 478 aa, unidentified; identical to SEQ ID NO: 24531
  REGION 1..478: note = metagenome

SEQ ID NO: 25048 - protein, 478 aa, unidentified; identical to SEQ ID NO: 24531
  REGION 1..478: note = Human gut metagenome

SEQ ID NO: 25049 - protein, 443 aa, unidentified
  REGION 1..443: note = metagenome
MMKVFVLDKDHKPLMPCGPARARKLLKAGRARVHKLQPFTIRIVDRSLADSVVQKVVVKVDPGSKETGIAVVREDEEETHHALYFINFKHRGAAIRDALTSRRQLRRGRRSRNLRYRAPRFLNRSKPKGWLPPSLQHRVDTTLSWVNRLRRLAPVSGIAQELVKFDTQLMQNPDISGVEYQQGELAGYELKEYLLEKFGRRCVYCAKSDVPLNVEYIVPKARGGSNRLSNLAIACVECNQKKGAKPIEEFLKGKPELLARVRKQLKTPLRDAASVNATRWALFHALSATGLPVRTGSGALTKYNRHCFGVPKEHWFDALCVGRINGVSYDSCMKVLNVSCTGRGQYKRTRTDKFGFPICHFMRTKRPHGVGLGDLVRMTVQKGKHPGIWTGRAFPSNDGRVVLILPEFRIWGRARNCSILSLSDGYGYRLTDSETTKPTSFGK

SEQ ID NO: 25050 - protein, 478 aa, unidentified; identical to SEQ ID NO: 24594
  REGION 1..478: note = Human gut metagenome

SEQ ID NO: 25051 - protein, 478 aa, unidentified; identical to SEQ ID NO: 24812
  REGION 1..478: note = Human gut metagenome

SEQ ID NO: 25052 - protein, 608 aa, Streptomyces sp.; identical to SEQ ID NO: 24669

SEQ ID NO: 25053 - protein, 417 aa, unidentified; identical to SEQ ID NO: 24686
  REGION 1..417: note = Human gut metagenome

SEQ ID NO: 25054 - protein, 522 aa, unidentified
  REGION 1..522: note = Human gut metagenome
MTGSYTAAPPQTEHHAVDVPHQMTGSYTVKRRKRFPTVVDIPHRMTGNCTRSVKGKNKMPVCVLSANGERLMPTENYGKVRHLLKDGRAVIAKRNPFTIQLTYDTSTYTQPIEMCVGTGYEHIGVSIKTKAKEVVSQQYDLLTNERSRHDDCRAYRRTRRNRLRYRAARFNNRVSSKKPGWIAPSLDNKVERHLDIISRYLSVMPVTDVFIKAATYDTQLLAALEAGEPVPQGKDYQHGPQYGYDTLREAVFERDHYTCVYCKRGLKDGAILHVHHAYYWKGLHGNSMRELATCCEKCNTPANHKEGGKLWGFDKPLRKYTGEAFMNSVRWILYQRAMARFQGVAEVHMTYGVISKRVRTNLGLPYSCATDAYCMGELRPEARCETEVFQKYRRNNRVLSKFYDAKYYDTREKGVIRSGNELSSGRTNRNHNLDGENLRRFRGCKKSKGRTSTRKQRYAMQPGDIVVYGNRKYVSKGCSSYGKALSLLTDGKPLMVSMKKIQLVRHKGGWVRLPHAAAEAKK

SEQ ID NO: 25055 - protein, 417 aa, unidentified
  REGION 1..417: note = Human gut metagenome
MVYVLDINGHPLMPTERHGKVKHLLKNGKAKVVKRCPFTIQLLYKSLTYTQSIILGVDAGSKHIGLSATTNDKEFYASDVELRTDIVKLISKRRELRRSRRNRKTRYRQARFDNRKRKDGWLAPSISQKIKCHIKVVENVHKILPITNIVVETASFDIQKIKNPNIKDTEYQQGEQLDFWNVREYVLFRDEHICQCCKGKTKDKILNVHHIESRKTGGNAPNNLITLCETCHKGYHNGTVRLPKTIKRGIIFRDAAFMGIMRWAFYNKLREKYKNVSMTYGYITKNTRIENKLPKKHYVDARCISGHPLAKPFEMIYYQKKIRCHNRQLFKINTLKGGTRKRNQSERVIKGYILFDKVKYQGKEYFVFGRRISGFFDIRELNGNKVNKGSINCKKLKLIERCSGYLIELRKETVLLS

SEQ ID NO: 25056 - protein, 500 aa, unidentified; identical to SEQ ID NO: 24937
  REGION 1..500: note = Human gut metagenome

SEQ ID NO: 25057 - protein, 501 aa, unidentified; identical to SEQ ID NO: 24556
  REGION 1..501: note = Human gut metagenome

SEQ ID NO: 25058 - protein, 367 aa, Beggiatoa sp.
MVYVIDIHGNPLMPTQRLGKVRRWLKQGQAIVVGHSPFTIKLLFETGNCVQSLTLGIDTGYKTVGISVVSSKQELLSTEIQLRIDVSEKLTEKRMYRRNRRNRLRYRQPRFLNRKKAISLAPSVLHKINSHLRIIKWVKSLLPIAKIVMEMGNFDPHKLKNPEIKGIEYQQGEQWGYENVKAYILARDGHRCYFYQANQGNCSEKLHVHHLIYRSNGGTDAPSNLITLCEKHHALVHKNRLKLARVQFKSLKSATIMNIVNNPLCHKLPTAQTTFGYMTKVMRTQLSLAKSRIHDAYVIAGGNDQQRLSPLQLLFKRKNNRSLQRLFKGNKRSLRTQRYPIQPNDIIEYDGKIYPSEGTHCKDSRGR

SEQ ID NO: 25059 - protein, 478 aa, unidentified; identical to SEQ ID NO: 24531
  REGION 1..478: note = Human gut metagenome

SEQ ID NO: 25060 - protein, 460 aa, unidentified; identical to SEQ ID NO: 24549
  REGION 1..460: note = Human gut metagenome

SEQ ID NO: 25061 - protein, 478 aa, unidentified; identical to SEQ ID NO: 24531
  REGION 1..478: note = Human gut metagenome

SEQ ID NO: 25062 - protein, 391 aa, Sutterella sp.; identical to SEQ ID NO: 24697

SEQ ID NO: 25063 - protein, 413 aa, unidentified
  REGION 1..413: note = Human gut metagenome
MVYVIDKQGNPLMPMERYGKVRRMLKSGQARVYSRTPFVIQLCYDIKEPKCQEVVLGVDAGHKELALSGCSSAQELYAAKVMLRTDVPKLMEAKKNFKRRRKINRRYRAKRSQNRKRNSEHGWAAPSVKVKVDEIIQAILRVKQILPVTEVRMEIAEFNYPQIRQYIYDGIAIPHELDLYDVRQYMLWNSYHTCESCKGREDTKKLIVVGQEAKDMVVLCANCYLRYEAGKKKLPKPKMRKSPADIPEFGMVRKYLRRRIYSAIDPSEIVEVYGYQTKIRREKFKLPYSKLNNAFAIAASTESQSSSDKVYCYKILRRHNRMLHNATVLKGGTRKLHQAPYIVKGFRLWDKVLFENQECFVAGRRKTGYFLLKDIKGNIVHTAASYKRIRLLEMSKGYIVAEYSRKESMFGAE

SEQ ID NO: 25064 - protein, 413 aa, unidentified
  REGION 1..413: note = Human gut metagenome
MVYVIDKQGNPLMPMERYGKVRRMLKNGQARVYSRTPFVIQLCYDIKEPKCQEVVLGVDAGHKELALSGCSSAQELYAAKVMLRTDVSKLMEAKKNFKRRRKINRRYRAKRSQNRKRNSEYGWAAPSVKVKVDEIIQAILRVKQILPVTEVRMEIAEFNYPQIRQYIYDGIAIPHELDLYDVRQYMLWNSYHTCESCKGREDTKKLIVVGQEAKDMVVLCANCYLRYEAGKKKLPKPKMRKSPADIPEFGMVRKYLRRRIYSAIDPSEIVEVYGYQTKIRREKFKLPYSKLNNAFAIAASTESQSSSDKVYCYKILRRHNRMLHNATVLKGGTRKLHQAPYIVKGFRLWDKVLFENQECFVAGRRKTGYFLLKDIKGNIVHTAASYKRIRLLEMSKGYIVAEYSRKESMFGAE

SEQ ID NO: 25065 - protein, 428 aa, Moorena sp.
MAVFVLDRRGRPLMPCSEKRARLMLERQRARVHRLMPFVIRLTDRLIEESTLQPVRIKIESGSKITGLALVREDGESTAVLNLFELIHRGRQISEGLSSRSNFRRRRRSANLRYRAPHYANPARTNGWLPPSLRHRIDTTKSWVRRFIRWAPVSGLASELVRYDLAAVEGDERVSDNQEHAEIAAQEIRAYLLDKWGHQCVYCDSDRQHVQIDPIDLRTAGEPARDISGLILACTSCIARRAGRDISEFVTDRARLERLRNWTKAPQRDRAAVDGARSAIAQFLATTGLPVELASGGRTKWNRTRFALPKSQALDAVCVGAVTAVVCWRIPVIKIKCTGRGRYQRTLVNAHGFPRAHLMRNKRIHNVQTGDRVRATVPTGKKAGIHTGRVAVRSRGYFDVHKPDGPVTGIHHRYCVVLQRADGYSYSM

SEQ ID NO: 25066 - protein, 561 aa, Roseburia sp.
VALFDASSRKPCKADTESKKTVFPAMHRLIPDAPPPFGSVTLHGNHPKEKFSLQEQAYIYVIGLDGRPQMPTRRHRHVKKLLNTGKARIVEHVPYTIQLLYENSPVLQPLQLTENPGRTNIGIAVLTEQGKLVFSASAETRNKEIHKLMEKRKQHRQNSRAGERKARQRLARKHGTTLKEGHLDRKLPYYKEEKPVTCKDIRNTEARYCNRKRKSGWLTPTVEQLVRTHLNLVHKVQRFLPITDIALEINRFAFALLDDPSATGIDFQTGPLKGYDDIHAAVSDQQHGVCLLCGKEIEAFTYIVPKAKGGSETLANVAGVCNCCLEKLHTDQNVREELKQQKEGQFKKYGALSAINQAIPYICEQLIREYGSSHVQFCTGGETYHMRELLGYTKEQAMTAPAIDAYVIGLVSLGIIPEEKPDFTFSHQIRQFRRQDRRIIKSQRERTYKYHGTTVAKNRNSRFQQTSPSLADWYQEMCLTYGTTQAEKMRSQLTVVKSTRRYNNPNRLYPGTVFYYRGERHVMSGQLSNGLYLRAVGDSKTNYKAKECWVAKRNAGLVFVE

SEQ ID NO: 25067 - protein, 503 aa, Moorena sp.
MLPQSRTLEEGDHAGKRQSAKGSLLPRRWAAGRAHSRGERARNANQAPSPEITGKGSVSSHVFVLDKRKRPLMPCLPVRAKRLLSLGRAGVHRVYPFTIRLKFRTSGNTQPVQLKLDPGSRTTGLALLREDGIRQHVFWMVELEYRGEAIRASLTQRRAFRRHRSSANLQYQPPRFNNRARPEGWIAPSSRLRVDTTMSWVNRLGRLAPITGLSVELVRFDTLAMQNPEISGVEYQQGTLAGYELREYLLEKWGREGVYCGARNVPLEIDYIHPKSLEGSDRVSNLTLACQECNQAKGNQPVEKFLSGQPERLDRILAKARATLWDAVVVNSTRWALFHRVKETGLSVNAGTSGRTKWNRSRLSIPKAYCLDAVCVGGLESAEGWNRTFLKIKASGRGSYQRTWLNQHGFSRGYLMRRKVSFGFQTGEIARVVVPMGKKAGTYVGRIAIRASGSFKVQTADGVVQGVPHRFYRLLHRNDGYGYSHWTLTLPSLKGRGISRGVL

SEQ ID NO: 25068 - protein, 503 aa, Moorena sp.; identical to SEQ ID NO: 25067

SEQ ID NO: 25069 - protein, 525 aa, Moorena sp.
MEQMTMQRSNYVSARWQQTHSGMLPQSRTLEEGDHAGKRQSAKGSLLPRRWAAGRAHSRGERARNANQAPSPEITGKGSVSSHVFVLDKRKRPLMPCLPVRAKRLLSLGRAGVHRVYPFTIRLKFRTSGNTQPVQLKLDPGSRTTGLALLREDGIRQHVFWMVELEYRGEAIRASLTQRRAFRRHRSSANLQYQPPRFNNRARPEGWIAPSSRLRVDTTMSWVNRLGRLAPITGLSVELVRFDTLAMQNPEISGVEYQQGTLAGYELREYLLEKWGREGVYCGARNVPLEIDYIHPKSLEGSDRVSNLTLACQECNQAKGNQPVEKFLSGQPERLDRILAKARATLWDAVVVNSTRWALFHRVKETGLSVNAGTSGRTKWNRSRLSIPKAYCLDAVCVGGLESAEGWNRTFLKIKASGRGSYQRTWLNQHGFSRGYLMRRKVSFGFQTGEIARVVVPMGKKAGTYVGRIAIRASGSFKVQTADGVVQGVPHRFYRLLHRNDGYGYSHWTLTLPSLKGRGISRGVL

SEQ ID NO: 25070 - protein, 477 aa, unidentified
  REGION 1..477: note = Marine metagenome
VTSDDNIVEAYFTGGCGFYRGQHLIASLKANQMSKVFVVDKERRPLAPCTPRRARLLLSECKASVLRQYPFTIILKESHATATPRPFRLKIYPASKTTGLAVINESTAEVVWAAELKHRGHLIKKALESRRSLRSGRRSRKTRYRPARWLNRVRKPPVFTNTEGVVVTGKWLPPSLQHRIEVVMTWVERLQHYLQITALSQEVMRFDTQKLQNLEISGVEYQQGTLHGYEVREYLLEKWSRKCAYCGARDTRLEISHLIARSRGGSDQVSNLTLACKACRDQKGASNLEEFLATKPKILKKLQSQARVSLKDVAAINSTRLALLERLKATGLPVEVSSGGETKYNRNQQQIPKSHWLDAVCVGASTPENLEWQQVNPLAIKAMGHGKRQMVNVDAFGFPRGKPKGIPVHPFRTGDIVRVTIPKGKYAGEYEERISSIKTSETRVGIPNKKEKGTIYLQTKYITAKIFSSDGYDYDYL

SEQ ID NO: 25071 - protein, 413 aa, unidentified; identical to SEQ ID NO: 25064
  REGION 1..413: note = Human gut metagenome

SEQ ID NO: 25072 - protein, 413 aa, unidentified
  REGION 1..413: note = Human gut metagenome
MVYVIDKQGNPLMPMERYGKVRRMLKNGQARVYSRTPFVIQLCYDIKEPKCQEVVLGVDAGHKELALSGCSSAQELYAAKVMLRTDVSKLMEAKKNFKRRRKINRRYRAKRSQNRKRNSEHGWAAPSVKVKVDEIIQAILRVKQILPVTEVRMEIAEFNYPQIRQYIYDGIAIPHELDLYDVRQYMLWNSYHTCESCKGREDTKKLIVVGQEAKDMVVLCANCYLRYEAGKKKLPKPKMRKSPADIPEFGMVRKYLRRRIYSAIDPSEIVEVYGYQTKIRREKFKLPYSKLNNAFAIAASTESQSSSDKVYCYKILRRHNRMLHNATVLKGGTRKLHQAPYIVKGFRLWDKVLFENQECFVAGRRKTGYFLLKDIKGNIVHTAASYKRIRLLEMSKGYIVAEYSRKESMFGAE

SEQ ID NO: 25073 - protein, 457 aa, unidentified; identical to SEQ ID NO: 2054
  REGION 1..457: note = Ga0099850_1002913

SEQ ID NO: 25074 - protein, 414 aa, unidentified
  REGION 1..414: note = Freshwater metagenome
VVATDALPAKAERGVSHKLSQENSVFVVGRNEEPLMPCHPARARRLLANGRTRIHRLHPFTIRLTDRTTGAVQPTFVKMDPGSKVTGIAIVRQGVGVQHVLHLSELTHRGASVRKHVSQRAMFRRRRRSANFRYRAPRFNNRTRRNGWLPPSLMRLIDNIQSWITRFLLIVPVTGFVQKLVRFDMQAMTNPDIQGVEYQRGTLAGHELREYLLEKWRRKCAYCDAENVPLQVERIHPKARGGSDRVTNLTLACRCCNEAKGSQPVETFLAKKPGLLKCILAQAKQPLSDTAAANSTRWELWRRLSATGLPVQTGSGGRTKWNRSRFDVPKSHCLDAVCAGTVETVAGWNRQPLTIKATGRGSYQRARLDAYGFPRGFLMWRKLVHGFQTGDLVRAIVPTGKKAGPYTGRAPCGR

SEQ ID NO: 25075 - protein, 413 aa, unidentified; identical to SEQ ID NO: 2427
  REGION 1..413: note = Human gut metagenome

SEQ ID NO: 25076 - protein, 525 aa, Moorena sp.; identical to SEQ ID NO: 25069

SEQ ID NO: 25077 - protein, 560 aa, Streptomyces sp.
VTTFQVSEKTHQAVLPQRPALESAAADTPGSRDETGDGRSTRKGGAAGLEHGRGEMRESDLRALARHSEAVASASAEGENAADNGSAMQNVGSGAAFVAVLDRRGVPLMPCHPARARELLAKGRAVVARHTPFVIRLKDREVKESAVPGVAVRIDPGSKGTGIAVTVDVHATSGEDGAGFTTRRGLVAIELRYRGAQIHKAMSQRAAYRRARRSRNLRYRAPRFDNRSRSAGWLGPSVQHRVDTTGSTVRQLIRYVPVSELHVERVSFDTHAMSQGRGWLEASEYQQGTLAGYEARQYLLEKWGRKCAYCGIGDVPLQVEHVQPRAYGGSDRLSNLTLACAPCDAAKGKQSVTEFLSHRPAALKRILAQIKTPLRDAAVMNATRWRIVDQLRSTHLPVYSWSGGRTQYNRVSHGLAKTHTLYALAVGAVKGGTRIVRFPERVLVATAAGRGTYARTRSDRHGFPRLSLPRTKQCFGYATGDLVRAVIPSGKYAGSWTGRVAVRSTGRFNIRSSRGTAQGIHQRYIHLLQRADGYGYITREEEDAHRCADGVGMRVDRSDD

SEQ ID NO: 25078 - protein, 455 aa, unidentified
  REGION 1..455: note = uncultured SAR324 cluster bacterium
MSRVLVVDANRCPLAPCTPRRARLLLNSGKAAVLRLYPFTIILKQSYPTASPRPVRLKIDPGSKTTGIAVVTEATGEVVWAAELQHRGQLIKDALESRRSLRRGRRNRKTRYRPARWLNRKRTGPPVLTSANAVIQLGKWLAPSLQHRIEVIMTWVQRLRRYLPITAISQEIVRFDMQKMQNPEISGVEYQQGTLYGYEVREYLLEKWHRQCGYCGAKDKRLEVDHIVPRSHGGSNRVSNLTLSCEPCNKKKNQRPVAVFLAKKPDVLQKLQRQAKASLKDAAAVNSTRYALLERLKATGLPVEIASGGRTKFNRFERQIPKTHWLDAACVGASTPEVLRWEAVTPLAIKAMGHGKRQMVGTNKYGFPKGQPKCKPAHTYSTGDFVSAVVPKGMYAGTYTPRRIVKLSEEKRVRIKNDSGQVFPFQAQYVTARVFTADGYDYGFLKAPQSRVLAN

SEQ ID NO: 25079 - protein, 414 aa, unidentified; identical to SEQ ID NO: 25074
  REGION 1..414: note = Freshwater metagenome

SEQ ID NO: 25080 - protein, 413 aa, unidentified; identical to SEQ ID NO: 25072
  REGION 1..413: note = Human gut metagenome

SEQ ID NO: 25081 - protein, 413 aa, unidentified; identical to SEQ ID NO: 25064
  REGION 1..413: note = Human gut metagenome

SEQ ID NO: 25082 - protein, 414 aa, unidentified; identical to SEQ ID NO: 25074
  REGION 1..414: note = Freshwater metagenome

SEQ ID NO: 25083 - protein, 561 aa, unidentified
  REGION 1..561: note = Human gut metagenome
VALFDDSSRKPCKADTKSKKTVLSAMHRLIPDASPPLGSVRLHGNHTKEKLPLQEQTYIYVIGLDGRPQMPTRRHRHVKKLLNTGKARIVEHVPYTIQLLYENSPVLQPLQLTENPGRTNIGIAVLTEQGKLVFSASAETRNKEIHKLMEKRKQHRQNSRAGERKARQRLARKHGTTLKEGHLDRKLPYYKEEKPVTCKDIRNTEARYCNRKRKSGWLTPTVEQLVRTHLNLVHKVQRFLPITDIALEINRFAFALLDDPSATGIDFQTGPLKGYDDIHAAVSDQQHGVCLLCGKEIEAFTYIVPKAKGGSETLANVAGVCNCCLEKLHTDQNVREELKQLKEGQLKKYGALSAINQAIPYICERLIRECGSTHVQFCTGGETYHMRELLGYTKEQAMTAPAIDAYVIGLVSLGIIPEEKPDFTFSHQIRQFRRQDRSIIKSQRERTYKYHGATVAKNRNSRFQQTSPSLADWYQEMCLTYGTTQAEKMRSQLTVVKSTRRYNNPNRLYPGTVFYYRGERHVMSGQLSNGAYLRAVGDAKTNYKVKDCQIEKQNTGLVFVR

SEQ ID NO: 25084 - protein, 503 aa, unidentified; identical to SEQ ID NO: 25067
  REGION 1..503: note = SAR324 cluster bacterium JCVI-SC AAA005

SEQ ID NO: 25085 - protein, 413 aa, unidentified
  REGION 1..413: note = Human gut metagenome
MVYVIDKQGNPLMPMERYGKVRRMLKNGQARVYSRTPFVIQLCYDIKEPKCQEVVLGVDAGHKELALSGCSSAQELYAAKVMLRTDVSKLMEAKKNFKRRRKINRRYRAKRSQNRKRNSEHGWAAPSVKVKVDEIIQAILRVKQILPVTEVRMEIAEFNYPQIRQYIYDGIAIPHELDLYDVRQYMLWNSYHTCESCKGREDTKKLIVVGQEAKDMVVLCANCYLRYEAGKKKLPKPKMRKSPADIPEFGMVRKYLRRRIYSAIDPSEIVEVYGYQTKIRREKFKLPYSKLNNAFAIAASTETQSSSDKVYCYKILRRHNRMLHNATVLKGGTRKLHQAPYIVKGFRLWDKVLFENQECFVAGRRKTGYFLLKDIKGNIVHTAASYKRIRLLEMSKGYIVAEYSRKESMFGAE

SEQ ID NO: 25086 - protein, 443 aa, unidentified
  REGION 1..443: note = Human gut metagenome
VWLYQAVYNLGEGFLPSSEERTAFYWLLIYRKEHGIMQYVYVLNKHGEPLMPCSPGKARLLLKQQKACVVKRTPFTIKLLYGSAGYKQPITLGVDAGSKHVGLSASTEKRELYREEFTPRNDVVDLLSTRRQNRRSRRNRKTRYRAPRFDNRVHSKHKGWLAPSVEVKIQEHITVIKRICRILPITLVRVETAPTLYGGSMRMFIAIHSSSKLKLGSPLMQPSAIRFATARFFSMASIRRSTLRLSRSKDAATFSFSAALIFASPFMAPANAFLHFSRNDAGRLLFLFAFDFIAAPSHCFLLSPIIPYTTMNGQISAAKKRPPFLVTSELKSLCHRFATALPCFSRAHHNHLSPRIFSYSFWMSENSIRLLFCPLLSLPKPLSLTSQSKAILRSAILAWSLHSGKGFSSSGPQVMFRIPYSHLPGLMMNSLSMSVSRSSTPGK

SEQ ID NO: 25087 - protein, 413 aa, unidentified; identical to SEQ ID NO: 25063
  REGION 1..413: note = Human gut metagenome

SEQ ID NO: 25088 - protein, 526 aa, Moorena sp.
MLPQSAASEFASADNLRGKDETGSDRRGNPATVVQHGRGETREIGRNPLKAERSGRDGDRSVAALQITALRVFVLDKHGNPLIPCSPARARKLLKSKRARVHRLAPFVIRLADSEVTQSEVPGVEIGIDPGPKATGISVFRDSSDGRVGLVAIELQHRGQYIHNKLQQRASYRRGRRSRNLRYRSLRFNNRTKSKGWLAPSLRHRVDSTMSIVSRLPKWAPVTGIHQELVRFDLQKMQNSEISGVEYQQGTLQGYEVREYLLEKWQRKCAYCGAADVPLNIDHIQPKIMRGSNRVSNLTLACIPCNQSKDNLDLKPWLASRFAPTEAEATAKWVLALSKAPLKDEAAVNSTRWALYHALRATGLSISVGTGGQTKWNRSRFGLTKSHSLDAICVARCHLRRSSQRCGCLPIERHHLQGDRARDILSHHLRQVGISTSSTSAYQVHTRVSDRRSSASGSSIGQEDGYSRWRSSCAKFWQFQHHNEGRNHAGNQSSPLHAIAACRWLGIRAAKGGRACGPSGTIPPHG

SEQ ID NO: 25089 - protein, 525 aa, Moorena sp.; identical to SEQ ID NO: 25069

SEQ ID NO: 25090 - protein, 548 aa, Moorena sp.
MSTLHVSKKTNQEMLPQLPALESTLADKPEVGTKWGAETADNAVVGVQHRRVETGSGLTCLSQRHSSKSEQSDRGEDRSLAASLVSAQRVLAADKHGNPLIPCHPARARKLLQSGRARVHHLAPFVIHLVDREAGNSVVDGVEVGIDPGSKATGISVFWSSEAGRVGLSSLMLQYRGQFIHKKMQQRVSCRRGRRSRNLRYRAPRFNNRTDSKGWLAPGLRHWMDFSMSAVTKLAKWSPATTIPQELVRFDTQKMENPKISGVEYQSGELAGYEIREYLLAKSNRTCAYCGATDVPLNVDRIHPKSRNGSNHVSNVTRACIPCNQSKDAIELSTWLASRFPYNADAIVKRVLWHAKSPLKDAAAVNPTRWALCRALQATGSPVCTGTGGQTKWNRHQFRSSKSHSLIAICVGQVNRVVPYPSRVIITKTTGRGTHSRTSSAKSGFPRLSPPRTKPVQGFQTGDLVLAVVLTDKKAGIHLGRVAVRKSGSCDISTVSHTVQGIGYCRCVLLQRSDGEYEQREEVGPTARVGLSLLTAEAEGFSSHTHFR

SEQ ID NO: 25091 - protein, 413 aa, Clostridium sp.; identical to SEQ ID NO: 2427

SEQ ID NO: 25092 - protein, 428 aa, Burkholderia sp.
MAVFVLDRRGRPLMPCSEKRARLMLERRRARVHRVMPFVIRLTDRLLEESRLQPVRIKIEPGSKITGLALVREDGESTAVLNLFELIHRGRQISEGLSARSNFRRRRRSANLRYRAPHYANPARTSGWLPPSLRHRVDTTKSWVTRFIRWAPVSGLANELVRYDLAAAESDESAPDNEEHAEIAAHEIRAYLLDKWGRQCVYCDSDRQHLQIDPIDLRTAGEPARHISGLILACTSCIARRAGRDIGEFVTDRARLVRLRNWTNAPQRDRAAVDGTRSAIAQFLATTGLPVDLSSGGRTKWNRTRLALPKSPALDAVCVGAVTAVVGWRIPVIKIKCTGRGRYQRTLVNAYGFPRAYLMRNKRIHNVQTGDRVRATVPTGKKAGIHTGRVAVRSRGYFDVHKPDGPVTGIHHRYCVVLQRADGYSYSM

SEQ ID NO: 25093 - protein, 413 aa, Moorena sp.; identical to SEQ ID NO: 2427

SEQ ID NO: 25094 - protein, 413 aa, unidentified; identical to SEQ ID NO: 25063
  REGION 1..413: note = Human gut metagenome

SEQ ID NO: 25095 - protein, 525 aa, Moorena sp.; identical to SEQ ID NO: 25069

SEQ ID NO: 25096 - protein, 454 aa, Moorena sp.
PEITGKGSVSSHVFVLDKRKRPLMPCLPVRAKRLLSLGRAGVHRVYPFTIRLKFRTSGNTQPVQLKLDPGSRTTGLALLREDGIRQHVFWMVELEYRGEAIRASLTQRRAFRRHRSSANLQYQPPRFNNRARPEGWIAPSSRLRVDTTMSWVNRLGRLAPITGLSVELVRFDTLAMQNPEISGVEYQQGTLAGYELREYLLEKWGREGVYCGARNVPLEIDYIHPKSLEGSDRVSNLTLACQECNQAKGNQPVEKFLSGQPERLDRILAKARATLWDAVVVNSTRWALFHRVKETGLSVNAGTSGRTKWNRSRLSIPKAYCLDAVCVGGLESAEGWNRTFLKIKASGRGSYQRTWLNQHGFSRGYLMRRKVSFGFQTGEIARVVVPMGKKAGTYVGRIAIRASGSFKVQTADGVVQGVPHRFYRLLHRNDGYGYSHWTLTLPSLKGRGISRGVL

SEQ ID NO: 25097 - protein, 560 aa, Streptomyces sp.; identical to SEQ ID NO: 25077

SEQ ID NO: 25098 - protein, 457 aa, unidentified
  REGION 1..457: note = Ga0129342_1006080
MSRVLVVDADRCPLAPCTPRRARLLLNSGKAAVLRRYPFTIILKQSYPTASPRPVRLKLDPGSKTTGIAVVTEATGEVVWAAELQHRGQLIKNALESRRSLRRGRRNRKTRYRPARWLNRKRTGPPVLSSADTVSTLGKWLAPSLQHRIEVIMTWVHRLRRYLPITAISQEIVRFDMQKMQNPEISGVEYQQGTLFGYEVREYLLDKWQRQCGYCGAKDKRLEVDHIVPRSHGGSDRVSNLTLSCEPCNKRKNQRPAAVFLAKKPEVLQKLQRQAKAPLKDAAAVNSTRYALLERLKATGLPVEIASGGRTKFNRSERQIPKTHWLDAACVGASTPEVLQWKAVKPLAIKAMGHGKRQVVNVDAYGFPRGKAKGIPVHPFRTGDIVRAEIPKGKYVGTYVSRIAETTTSKPLAGFKSKTGKRIQCHTKHMTKLFNSDGYGYGFLKAPEPRQTVISES

SEQ ID NO: 25099 - protein, 526 aa, Moorena sp.; identical to SEQ ID NO: 25088

SEQ ID NO: 25100 - protein, 525 aa, Moorena sp.; identical to SEQ ID NO: 25069

SEQ ID NO: 25101 - protein, 340 aa, unidentified
  REGION 1..340: note = uncultured SAR324 cluster bacterium
MSRVFVVDKERRPLAPCTPRRARLLLSDCKASVLRRYPFTIILQESHATATPRPLRLKIYPASKTTGLAVINESTAEVIWAAEIKHRSQQIKKALDSRRSLRSGRRYRKTRYRPARWLNRKRNSPVFVDAEGIAVKGKWLPPSLQHRVEVIMTWVNRLQRYLPITAISQEMMRFDTQKLQNLEINGVEYQQGTLHGYEVREYLLEKWSRECAYCGAREIRLEINHIVPRSHGGSDRVSNLTLACRSCRERRGATNLVEFLSTKPKLLKKIQSQAKAPLKDVAAINSTRLALLERLRATGLPVEVSSGGETKFNRNQQRIPRSHWLNAACIGASTPNNVKW

SEQ ID NO: 25102 - protein, 486 aa, unidentified
  REGION 1..486: note = SAR324 cluster bacterium JCVI-SC AAA005
VLSARGVTSDDNIVEAYFTGGCGFYRGQHLIASLKANQMSKVFVVDKERRPLAPCTPRRARLLLSECKASVLRQYPFTIILKESHATATPRPLRLKIYPASKTTGLAVINESTAEVVWAAELKHRGHLIKKALESRRSLRRGRRSRKTRYRPARWLNRVRKPPVLTNTEGVVVTGKWLPPSLQHRIKVVMTWVERLQHYLQITALSQEVMRFDTQKLQNPEISGVWYQQGTLHGYEVREYLLEKWSRKCAYCGARDTRLEISHLIARSRGGSDQVSNLTLACKACRDQKGDSNLEKFLATKPKILKKLQSQARVSLKDVAAINSTRLALLERLKATGLPVEVSSGGETKYNRNQQQIPKSHWLDAVCVGASTPENLEWQQVNPLAIKAMGHGKRQMVNVDAFGFPRGKPKGIPVHPFRTGDIVRVTIPKGKYAGEYEERISSIKTSETRVGIPNKKEKGTIYLQTKYITAKIFSSDGYEYYFYPNK

SEQ ID NO: 25103 - protein, 486 aa, unidentified
  REGION 1..486: note = SAR324 cluster bacterium
VLSARGVTSDDNIVEAYFTGGCGFFRGQHLIASLKANQMSKVFVVDKERRPLAPCTPRRARLLLSECKASVLRQYPFTIILKESHATATPRPFRLKIYPASKTTGLAVINESTAEVVWAAELKHRGHLIKKALESRRSLRRGRRSRKTRYRPARWLNRVRKPPVFTNTEGVVVTGKWLPPSLQHRIEVVMTWVERLQHYLQITAISQEVMRFDTQKLQNPEISGVEYQQGTLHGYEVREHLLEKWSRKCAYCGARDTRLEISHLIARSRGGSDQVSNLTLACKACRDQKGDSNLEKFLATKPKILKKLQSQARVSLKDVAAINSTRLALLERLKATGLPVEVSSGGETKYNRNQQQIPKSHWLDAVCVGASTPENLEWQQVKPLAIKAMGHGKRQMVNVDAFGFPRGKPKGIPVHPFRTGDIVRVTIPKGKYAGEYEERVSSIKTSETRVGIPNKKEKGTIYLQTKYITAKIFSSDGYEYYFYPNK

SEQ ID NO: 25104 - protein, 414 aa, unidentified; identical to SEQ ID NO: 25074
  REGION 1..414: note = Freshwater metagenome

SEQ ID NO: 25105 - protein, 269 aa, unidentified
  REGION 1..269: note = Human gut metagenome
MVYVIDKQGNPLMPMERYGKVRRMLKSGQARVYSRTPFVIQLCYDIKEPKCQEVVLGVDAGHKELALSGCSSARELYAAKVMLRTDVSKLMEAKKNFKRRRKINRRYRAKRSQNRKRNSEHGWAAPSVKVKVDEIIQAILRVKQILPVTEVRMEIAEFNYPQIRQYIYDGIAIPHELDLYDVRQYMLWNSYHTCESCKGREDTKKLIVVGQEAKDMVVLCANCYLRYEAGKKKLPKPKMRKSPADIPEFGMVRKYLRRRIQHISGEDLC

SEQ ID NO: 25106 - protein, 431 aa, Moorena sp.
MPCLPVRAKRLLSLGRAGVHRVYPFTIRLKFRTSGNTQPVQLKLDPGSRTTGLALLREDGIRQHVFWMVELEYRGEAIRASLTQRRAFRRHRSSANLQYQPPRFNNRARPEGWIAPSSRLRVDTTMSWVNRLGRLAPITGLSVELVRFDTLAMQNPEISGVEYQQGTLAGYELREYLLEKWGREGVYCGARNVPLEIDYIHPKSLEGSDRVSNLTLACQECNQAKGNQPVEKFLSGQPERLDRILAKARATLWDAVVVNSTRWALFHRVKETGLSVNAGTSGRTKWNRSRLSIPKAYCLDAVCVGGLESAEGWNRTFLKIKASGRGSYQRTWLNQHGFSRGYLMRRKVSFGFQTGEIARVVVPMGKKAGTYVGRIAIRASGSFKVQTADGVVQGVPHRFYRLLHRNDGYGYSHWTLTLPSLKGRGISRGVL

SEQ ID NO: 25107 - protein, 428 aa, Burkholderia sp.; identical to SEQ ID NO: 25092

SEQ ID NO: 25108 - protein, 413 aa, unidentified; identical to SEQ ID NO: 2427
  REGION 1..413: note = Human gut metagenome

SEQ ID NO: 25109 - protein, 354 aa, unidentified
  REGION 1..354: note = Human gut metagenome
MVYVIDKQGNPLMPMERYGKVRRMLKSGQARVYSRTPFVIQLCYDIKEPKCQEVVLGVDAGHKELALSGCSSAQELYAAKVMLRTDVPKLMEAKKNFKRRRKINRRYRAKRSQNRKRNSEHGWAAPSVKVKVDEIIQAILRVKQILPVTEVRMEIAEFNYPQIRQYIYDGIAIPHELDLYDVRQYMLWNSYHTCESCKGREDTKKLIVVGQEAKDMVVLCANCYLRYEAGKKKLPKPKMRKSPADIPEFGMVRKYLRRRIYSAIDPSEIVEVYGYQTKIRREKFKLPYSKLNNAFAIAASTESQSSSDKVYCYKILRRHNRMLHNATVLKGGTRKLHQAPYIVKGFRLWDKVLF

SEQ ID NO: 25110 - protein, 503 aa, Moorena sp.; identical to SEQ ID NO: 25067

SEQ ID NO: 25111 - protein, 454 aa, Moorena sp.; identical to SEQ ID NO: 25096

SEQ ID NO: 25112 - protein, 431 aa, Moorena sp.; identical to SEQ ID NO: 25106

SEQ ID NO: 25113 - protein, 532 aa, Moorena sp.
MLPQSAALEFASADNLRGKDETGSERRGNPVTVVQHGRGETREIGRNSAEPDLSSEAEDRSLTAPQITASRVFVLDKHGNPLMPCSSARARKLLKSKRARVHRLAPFVIRLVDREVTQSEVPGVEVGIDPGSKATGISVFRDSPDGRVGLVAIELQHRGQYIHKKLQQRSGYRRGRRSRNLRYRAPRFNNRAKPKGWLAPSLQHRVDSTMSIVSRLRQWAPVTGIHQELVRFDMQQMQNPEISGVEYQQGELAGYEVREYLLAKWNRTCAYCGATDVPLNIDHIQPKIKGGSNRVSNLTLACILCNQSKDAIELSTWLTSRFAPTEAEDIAKRVLARAKSPLRDAAAVNSTRWALYSALQATGLPVSVGTGGQTKWNRSRFRLAKSHTLDALCVGQVNGVVAHPSNVIISKATGRGTYSRTVSDKSGFPRLMRPRIKCIQGFQTGDLVQTVVPSGKKMGTHVGRVAVRSSGSFNITTKGKTMQGISHRHCTLLQRGDGWGYEQRKEVGPVARVGLSLPTAKAGGFSSHTHSR

SEQ ID NO: 25114 - protein, 413 aa, unidentified
  REGION 1..413: note = Human gut metagenome
MVYVIDKQGNPLMPMERYGKVRRMLKSGQARVYSRTPFVIQLCYDIKEPKCQEVVLGVDAGHKELALSDCSSAQELYAAKVMLRTEVPKLMEAKKNFKRRRKINRRYRAKRSQNRKRNSEHGWAAPSVKVKVDEIIQAILRVKQILPVTEVRMEIAEFNYPQIRQYIYDGIAIPHELDLYDVRQYMLWNSYHTCESCKGREDTKKLIVVGQEAKDMVVLCANCYLRYEAGKKKLPKPKMRKSPADIPEFGMVRKYLRRRIYSAIDPSEIVEVYGYQTKIRREKFKLPYSKLNNAFAIAASTESQSSSDKVYCYKILRRHNRMLHNATVLKGGIRKLHQAPYIVKGFRLWDKVLFENQECFVAGRRRTGYFLLKDIKGNIVHTAASYKRIRLLEMSKGYIVAEYSRKESMFEAE

SEQ ID NO: 25115 - protein, 413 aa, unidentified; identical to SEQ ID NO: 25063
  REGION 1..413: note = Human gut metagenome

SEQ ID NO: 25116 - protein, 336 aa, unidentified
  REGION 1..336: note = Human gut metagenome
MVYVIDKQGNPLMPMERYGKVRRMLKNGQARVYSRTPFVIQLCYDIKEPKCQEVVLGVDAGHKELALSGCSSAQELYAAKVMLRTDVSKLMEAKKNFKRRRKINRRYRAKRSQNRKRNSEYGWAAPSVKVKVDEIIQAILRVKQILPVTEVRMEIAEFNYPQIRQYIYDGIAIPHELDLYDVRQYMLWNSYHTCESCKGREDTKKLIVVGQEAKDMVVLCANCYLRYEAGKKKLPKPKMRKSPADIPEFGMVRKYLRRRIYSAIDPSEIVEVYGYQTKIRREKFKLPYSKLNNAFAIAASTESQSSSDKAKEVSRDRNEDSCLCFDVEEKYVSTIS

SEQ ID NO: 25117 - protein, 233 aa, unidentified
  REGION 1..233: note = Human gut metagenome
MVYVIDKQGNPLMPMERYGKVRRMLKSGQARVYSRTPFVIQLCYDIKEPKCQEVVLGVDAGHKELALSGCSSARELYAAKVMLRTDVSKLMEAKKNFKRRRKINRRYRAKRSQNRKRNSEHGWAAPSVKVKVDEIIQAILRVKQILPVTEVRMEIAEFNYPQIRQYIYDGIAIPHELDLYDVRQYMLWNSYHTCESCKGREDTKKLIVVGQEAKDMVVLCANCYLRYKGIYCF

SEQ ID NO: 25118 - protein, 483 aa, Moorena sp.
  SITE 222: note = misc_feature - Xaa can be any naturally occurring amino acid
VLSARGVTSDDNIVEAYFTGGCSFLGGQHLIASLKANQMSKVFVVDKERRPLAPCTPRRARLLLSECKASVLRQYPFTIILKESHATATPRPLRLKIYPASKTTGLAVINESTAEVVWAAELKHRGHLIKKALESRRSLRRGRRSRKTRYRPARWLNRVRKPPVFTNSEGVVVTGKWLPPSLQHRIEVVMTWVERLQHYLQITAISQEVMRFDTQKLQNPEXSGVEYQQGTLHGYEVREYLLEKWSRKCAYCGARDTRLEISHLIARSRGGSDQVSNLTLACKACRDQKGDSNLEKFLATKPKILKKLQSQARVSLKDVAAINSTRLALLERLKATGLPVEVSSGGETKYNRNQQQIPKSHWLDAVCVGASTPENLEWQQVNPLAIKAMGHGKRQMVNVDAFGFPRGKPKGIPVHPFRTGDIVRVTIPKGKYAGEYEERISSIKTSETRVGIPNKKEKGTIYLQTKYITAKIFSSDGYDYDYL

SEQ ID NO: 25119 - protein, 495 aa, Streptosporangium sp.
MEHGRGEIGSGGTRLDRRHPEGASASEGADREVHPAVFVLDAHGQSLDPCHPARARRLLAAGRAVVARHTPFVIRLKDRTVADSAIQGVQVSIDPGSKHTGIAIFTEYGGSRTGVYSVQLDHRGAQIRDKLTSRAALRRGRRSRNLRYRAPRFNNRTRPKGWLAPSLRHRVDTTMSWVSRLTRWAPVTAIHVEKVAFDTHALSAGHPLEGSQYQQGTLAGYEVREYLLEKWGRTCAYCGAQNVPLNIDHLHPRSRGGSDRISNLVLACIPCNQAKNATPIEEFLKSRPALLAKIFKRAKASLRDAAAVNATRWALWRALDATGLSVTTASGGRTKWNRSRTGAPKSHTLDALHVGDLETVTAWPSMVLVVKATGRGTYCRTRTDAYGFPRLRLPRIKQVKGFTTGDLVRANVPNGKKAGVHTGRVAVRSTGRFNITTRHGTVQGIGHRHIRLLQRADGYGYTTQSDARTIPCFLPALKDRVSTLEVIDDTSGISP

SEQ ID NO: 25120 - protein, 289 aa, Moorena sp.
VFIFILNCHHQLLMPCSPRKARLLLKGKKAKIVSMEPFTLQLLSGSSGYKQEVSLGIDAGTHTIGLSATTEKQVLFEAEAKLRTDIQELLATRRQFRRARRNRKTGYRQARFQNRKKPQGWLPPSVQHRLDAHLKVIRLVHRILPVSKTTIEVAQFDLQKIQHPEIEGPGYQHGPQQGFWNVREYVLWRDGHQCQWCQGRSKDAVLNVHHIESRKTGGDRPENLITVCKTCHALLHRTHQEQKITRKSNGFRDATQMGVLRWKIYEQVKALFPHVHLIYGYRTSATRLA

SEQ ID NO: 25121 - protein, 428 aa, Moorena sp.
MSVFVLDTNKTPLAPCHEDRARRLLKSGKAALYRRFPFTIILKRAVENPHVPDLRVRLDPGSKTTGIAVVDDQSGQVVFAAELSHRAHTIKGSLDDRRAVRRSRRNRKTRYRKARWQNRKRKEGWLPPSLESRIANILTWIARLRKFSHITSISLELVSFDMQLMQNPEISGVEYQQGTLAGYETREYLLQKWGRKCAYCSKENIPLQIEHIVPRAKGGSNRVSNLCLSCEKCNLAKGSRSIEDYLKKKPELLKKILAQAKTPLKDAAAVNATRWELFRRLQGFALPIECGSGGLTKFNRTTRELSKTHWLDAACVGKSTPEVLVTFGVQPLLIKACGHGCRQMCLPDKYGFPRTSAKGAKSVKGFQTGDIVRAIITSGQKGGTYVGRVAVRSTGSFNVTTGEGTVQGISYKYCKALHRMDGYSYHLG

SEQ ID NO: 25122 - protein, 431 aa, unidentified
  REGION 1..431: note = Human gut metagenome
MVYVLDINGQPLMPTARHGKVRRLLNIHLAKVVKRCPFTIQLLYPNTKETQPVSLGVDAGSKHIGLAATTEKKVIYQEELIPRNDVVKLLSARRTLRRSRRSRKTRYRKPRFNNRVHSKHKGWLAPSVEVKIQEHITAIKNVCKILPVSEIHVETAEFDLQRLKAMEEGKPLPVGTDYQLGEQYDFYNTRQYVLHRDGYTCQCCDAHDKDVKLHVHHIESRQTGGNAPNNLVTLCEHCHKALHEGKIELPKNKKRGKSHRDAAFMGIMRNTLLERLKKEVDVPATMTYGYITKYWREKAGLEKSHINDAICISKHPYAKPLDAYYLTKAVRHHNRQIHKANFSKGGIRKRNQAPYLVKGFRLFDKVSYQSKEYFIFGRRATGFFDIRTLDGTKVNKGSVSYKKLRIQDTAKAYVKEVRAIPHMNEFTCVLA

SEQ ID NO: 25123 - protein, 427 aa, Moorena sp.
VSKVFVIDSEKRPLDPIHSAQARQLLRNKKAVFFRRFPFTLILKESRSDAPVQRLRLKIDPGAKHTGLALVNDSSGEVVFAAELKHRGFAIRDSLTSRRQLRRSRRNRKTRYRQPRFLNRTRPEGWLAPSLQSRVENIKTWVNKLRKLVSISAISQELVRFDMQLMRNRDIQGKEYQQGTLAGYETREYLLEKWNRQCAYCGVKDIALQIEHIHPRAKGGSNSITNLTLSCSKCNTKKGTKDIKEFLKKEPIRLEKILKQACIPLADAAAVNTTRFALLKILKATGLPVETGSGGLTKFNRNQQNLEKSHWLDAACVGSSTPILNIKGVKPLLITGNGHGTRQSCRTDKFGFPNRHCSRTKFHFGFQTGDIVKAAVTSGKKVGEYVGRIATRATGSFNISTKDGLVQGISHKFCKRIHAKDGYSYAT

SEQ ID NO: 25124 - protein, 554 aa, Streptomyces sp.
MTTFPAGEQTHRAVLPQQPALESASADTPGSRDETAHGHPAAGRGTGREHGRGETGGQGTAARRRHAEKAATAADEAENGNGDVPRSRPAYAGGSGASRVFVLSRDGQPLMPCHPARARELLRRGRAVVVRQAPFVIRLRDRALAESQVDGVELRIDPGSKGTGLVLTDEKRARATAGEDTAGTVRRGLISAELRHRGDRIRRSMRQRAAHRRRRRSANCRYRAPRRDNRARPPGWLPPSSRHRVDTTFSLAARMCRWAPVQEIHVEHVAFDTHSMSAGRRLAAAEHRHGALAGTGARALLHARWNGACAYCDTTSGPLNIDHVRPRSRGGSHRVSNLVLACVPCNTAKGSMPVELFLAHRPDRLAAVLEQTRAPLHDAAAMNATRRRLVEALTGLGPPVHTWPGGLTRGNRDAMGLGKTHTIDALCVGPLDQGCGGAIVRVPERVLVVEALGRGSYARTTPDRHGFPRLRRSRTKRHFGYVTGDLVRATVPSGKRAGTWTGRISVRARGQHSLVTPAGRFDVSCGNLRLLQRGDGYGWGARSEPVPSAPEKTG

SEQ ID NO: 25125 - protein, 426 aa, Moorena sp.
LSKVFVIDAEKRPLDSVHPAQARQLLRNKKAAVYRRFPFTIILKESRPDAPVQPLRLKIDPGAKTTGMGLVNDATGEVVFAAELKHRGFAIREALTSRRQLRRSRRNRKIRYRQPRFNNRTRPKGWLPPSLQSRIENIKTWVERLRKLALIKAITQELVRFDMQLMRNPEVCGKEYQQGTLAGYETREYLLEKWKRQCTYCGVKDVPLQIEHIHPRAKGGTNSITNLTLSCTKCNTKKGTKDIKEFLKKDPSRLEKILEHLLRPLADAAAVNTTRFTLLEVLKSTELPVETGSGGLTKFNRNQQNLEKTHWIDAACVGKSTPILNMKGVKPLLIIANGHGTRQSCRTDKFGFPNRHCSRTKFHFGFQTGDIVKAVVTSGKKAGEYVGRIATRATGSFNISTSSELVQGISHKYCKHIHKKDGYSYA

SEQ ID NO: 25126 - protein, 427 aa, Moorena sp.
LSKVFVIDLEKRPLDPVHPAQARQLLRNKKAAVFRRFPFTLILKDSRPDAPVQALRLKIDPGAKHTGIALVNDSTGEVVFAAELKHRGFAIRDALTSRRQLRGSRRNRKTRYRQPRFLNRTRPEGWLAPSLQSRIENIKTCVERLCKFAPIKAISQELVRFDMQLMRNPEIQGKEYQQGTLAGYETREYLLEKCDRQCAYCGVKDVPLQIEHIHPRAKGGSNSITNLTLSCSKCNTKKGTKDIKDFLKKDPLRLQKILKQACIPLADAAVVNTTRFALFEVLKSTGLPVETGSGGLTKFNRSQQNLEKSHWLDAACVGKSTPILDIKSVKPLLITANGHGTRQSCRTDKFGFPNRHCSRTKFHFGFQTGDIVKAVVTSGKKVGEYAGRIATRASGSFNISTKNGLVQGVSYKYCKHIHKKDGYSYAT

SEQ ID NO: 25127 - protein, 427 aa, Moorena sp.
MSKVFVIDLEKRPLDPVHPAQARQLLRNKKAAVFRRFPFTIILKDSQAYAPVQPIRLKIDPGAKHTGIAFVNDSTGEVVFAAELKHRGFAIRDALTSRRQLRRTRRNRKTRYRKPRFLNRTRSKGWLAPSLQSRVENIKTWVKRLRKLAPITAISQELVRFDMHLMRNPNIQGKEYQQGTLAGYETREYLLEKWGRQCAYCGVKDVPLQIEHIHPRAKGGSNSITNLTLSCSKCNTKKGSKDIKEFLKKDQTRLEKILKQAKRPLADAAAVNTTRFALLEVLKSAGLPVETGSGGLTKFNRSQQNLEKSHWLDAACVGKSTPILNIKEIKPLLITANGHGSRQSCRTDKFGFPSRYVPRFKFVKGFQTGDIVKAVVGTGKKIGEYVGRVAVRTTGSFNISTNNGLVQGISYKYCSAIHKKDGYGYAN

SEQ ID NO: 25128 - protein, 413 aa, unidentified; identical to SEQ ID NO: 23760
  REGION 1..413: note = Erysipelotrichaceae bacterium SG0102

SEQ ID NO: 25129 - protein, 413 aa, unidentified; identical to SEQ ID NO: 23772
  REGION 1..413: note = Erysipelotrichaceae bacterium SG0102

SEQ ID NO: 25130 - protein, 451 aa, unidentified
  REGION 1..451: note = Erysipelotrichaceae bacterium SG0102
MSVCVVAPDKKPLMPTSEYRARKLLKSGKAVIFKYKPFTIMLTRIVSENMQPIEYCCDTGYKHIGVSIKSEKHEYFDCQFDMLQDEKKCHDDRRKMRRARRNRLRYRKPRFDNRTASKKEGWLAPSLRNIRDQHIRIFERFLEVMPIVSATFEMGSFDVHAMHEFEATGTVLKGDDYQKGPRYGMNTLRKAVFYRDNYTCQVCGKTTDKGAILRVHHIGFKTGDHTNRISNLLTVCTKCHTSANHKPGGKLYDLKPRTKPFNGAAFMNAVRWQMFRTLKSTHPDLEWHMTYGAATQEARRVLHLEKSHANDAYAMGEFHPRRRTPFMHFQKLRRNNRILEKFFDAKYVDARDGKTKKGAELSCGRTDRSESRHSEKNLRVFRERKVSKGRRVIRRSHYTLRPGDNVVIGGEKHRAKGVHNKGTYVVTDAKKSVPVKKVEKIIHAGGYMPVK

SEQ ID NO: 25131 - protein, 447 aa, unidentified
  REGION 1..447: note = Erysipelotrichaceae bacterium SG0102
MSVCVVAPDKKPLMPTSEYRARKLLKSGKAVIFKYKPFTIMLTRIVSENMQPIEYCCDTGYKHIGVSIKSEKHEYFDCQFDMLQDEKKRHDDCRKMRRARRNRRRYRKPRFDNRTASKKEGWLAPSLRNIRDQHIRIFERFLEVMPIVSATFEMGSFDVHAMHEFEATGTVLKGDDYQKGPRYGMNTLRKAVFYRDNYTCQVCGETADEGAILRVHHIDFETGDHTNRMSNLLTVCTKCHTSANHKPGGKLYDLKPRTKPFNGAAFMNAVRWQMFRTLKSTHPDLEWHMTYGAATQEARRVLHLEKSHANDAYAMGEFHPRRRTPFMHFQKLRRNNRILEKFFDAKYVDARDGKTKKGAELSCGSESRHSEKNLRVFRERKVSKGRRVIRRSHYTLRPGDTVVIGGEKHRAKGVHNKGTYVVTDAKKSVPVKKVEKIIHAGGYMPVK

SEQ ID NO: 25132 - protein, 451 aa, unidentified
  REGION 1..451: note = Erysipelotrichaceae bacterium SG0102
MSVCVVAPDKKPLMPTSEYRARKLLKSGKAVIFKYKPFTIMLTRIVSENMQPIEYCCDTGYKHIGVSIKSEKHEYFDCQFDMLQDEKKRHDDRRKMRRARRNRLRYRKPRFDNRTASKKEGWLAPSLRNIRDQHIRIFERFLEVMPIVSATFEMGSFDVHAMHEFEATGTVLKGDDYQKGPRYGMNTLRKAVFYRDNYTCQVCGETADEGAILRVHHIGFETGDHTNRMSNLLTVCTKCHTSANHKPGGKLYDLKPRTKPFNGAAFMNAVRWQMFRTLKSTHPDLEWHMTYGAATQEARRVLHLEKSHANDAYAMGEFHPRRRTPFMHFQKLRRNNRILEKFFDAKYVDARDGKTKKGAELSCGRTDRSESRHSEKNLRVFRERKVSKGRRVIRRSHYTLRPGDTVVIGGEKHRAKGVHNKGTYVVTDAKKSVPVKKVEKIIHAGGYMPVK

SEQ ID NO: 25133 - protein, 407 aa, Succinivibrio dextrinosolvens; identical to SEQ ID NO: 14790

SEQ ID NO: 25134 - protein, 417 aa, Bacillus selenitireducens
MFVYVLNKNGQPLMPCKPRKARLLLNEKKAKVVKQTPFTIQLLYGSSGYKQPVSLGVDAGTKHIGFSAPTEKDVLFEGDVQLRTDIQDKLATRRQYRRSRRSRKTRYRQPRFDNRKKEKGWLAPSVQHKVDSHIRFVEKVHALLPITTITVEVAQFDIQKIKKPEIEGEGYQQGDQFGFWNVREYVFFRDNHRCQHCKGKSKDKILNVHHIESRKTGGDSPDNLLTLCETCHKKIHREGLEHLFQRKKKPFRDASQMAVMRWFIYNGLKARYPDAKLTYGYLTKNTRIEHSLEKSHAVDARCISGHPTAKPSEATYQYKQVRKNNRQLHKTTILKGGIRKANKAERFVKGFQLFDKVLCEGQPCFIFGRRKTGSFDLRLLDGTVISRGKSYKKIALKEKATSWLVERSETVHIPPHE

SEQ ID NO: 25135 - protein, 586 aa, unidentified
  REGION 1..586: note = Erysipelotrichaceae bacterium SG0102
VSTALSFLREGRKRGYVIMSGKKNKSNHYIYVVDRHGNPVMPSRRPGRIRHLLKEGKAVPISTHPFVVKLKYDIPGRTQPIHLGIDTGRENIGVGASLENGENVFLSDVETKNKAVTKAMSDRRAYRMSRRRHRREKKQRHAHAKKSEMKNGRPAVKGERHTRKTVGRDIRYPGCKNPVTHKVIKGKEARIANRRRDEGWQTPSARQLIQTHMRIVRNVMKFLPVTHITIEMVSFDFQKLANVEIKNWEYSDGPLHGFKSPADYVWARQNGKCYFCDKKIAICHHAMHRAKGGSDRVGNLVGLCPECHQKLHSDRDMDKRLQEEFGTPKTCISVLNSAMPEIDRQMRALCDARGIVYDTCTGFDTYEARKRYGIPKDHCTDGYAISLYGRNANNVCLTDSVCMMRRFRKKSGSIIQKLNQRVYKLKGKVVAVNRHKRTDQKEPALDDYMSRYAQKHSEAECRRHFHELKIIPARRTYTYRKQKLVSPVHIGDTVRYEKRNKTSGITKKAVFVAEEIDMFNGKVKYGDQSGRYGKKSPLMKYCRPIKAGSLKFIRTIRLADCLSMARKEAEVRRKKQLKKPKNLVID

SEQ ID NO: 25136 - protein, 451 aa, unidentified
  REGION 1..451: note = Erysipelotrichaceae bacterium SG0102
MSVCVVAPDKKPLMPTSEYRARKLLKSGKAVIFKYKPFTIMLTRIVSENMQPIEYCCDTGYKHIGVSIKSEKHEYFDCQFDMLQDEKKRHDDRRKMRRARRNRLRYRKPRFDNRTASKKEGWLAPSLRNIRDQHIHIFERFLEVMPIVSATFEMGSFDVHAMHEFEATGTVLKGDDYQKGPRYGMNTLRKAVFYRDNYTCQVCGETADEGAILRVHHIGFETGDHTNRMSNLLTVCTKCHTSANHKPGGKLYDLKPRTKTFNGAAFMNAVRWQMFRTLKSTHPDLEWHMTYGAATQEARRVLHLEKSHANDAYAMGEFHPRRRTPFMHFQKLRRNNRILEKFFDAKYVDARDGKTKKGAELSCGRTDRSESRHSEKNLRVFRERKVSKGRRVIRRSHFTLRPGDTVVIGGEKHRAKGVHNKGTYVVTDAKKSVPVKKVEKIIHAGGYMPVK

SEQ ID NO: 25137 - protein, 451 aa, unidentified
  REGION 1..451: note = Erysipelotrichaceae bacterium SG0102
MSVCVVAPDKKPLMPTSEYRARKLLKNGKAVIFKHKPFTIMLTRIVSENMQPIEYCCDTGYKHIGVSIKSEKHEYFDCQFDMLQDEKKRHDDRRKMRRARRNRLRYRKPRFDNRTASKKEGWLAPSLRNIRDQHIRIFERFLEVMPIVSATFEMGSFDVHAMHEFEATGTVLKGDDYQKGPRYGMNTLRKAIFYRDNYTCQVCGETADEGAILRVHHIGFETGDHTNRMSNLLTVCTKCHTSANHKPGGKLYDLKPRTKPFNGAAFMNAVRWQMFRTLKSTHPDLEWHMTYGAATQEARRVLHLEKSHANDAYAMGEFHPRRRTPFMHFQKLRRNNRILEKFFDAKYVDARDGKTKKGAELSCGRTARSESRHSEKNLRVFRERKVSKGRRVIRRSHYKLRPGDTVVIGGEKHRAKGVHNKGTYVVTDAKKSVPVKKVEKIIHAGGYMPVK

SEQ ID NO: 25138 - protein, 451 aa, unidentified
  REGION 1..451: note = Erysipelotrichaceae bacterium SG0102
MSVCVVAPDKKPLMPTSEYRARKLLKSGKAVIFKYKPFTIMLTRIVSENMQPIEYCCDTGYKHIGVSIKSEKHEYFDCQFEMLQDEKKRHDDRRKMRRARRNRLRYRKPRFDNRTASKKEGWLAPSLRNIRDQHIRIFERFLEVMPIVSATFEMGSFDVHAMHEFEATGTVLKGDDYQKGPRYGMNTLRKAVFYRDNYTCQVCGETADEGAILRVHHIGFETGDHTNRMSNLLTVCTKCHTSANHKPGGKLYDLKPRTKPFNGAAFMNAVRWQMFRTLKSTHPDVEWHMTYGAATQEARKVLHLEKSHANDAYAMGEFHPRRRTPFMHFQKLRRNNRILEKFFDAKYVDARDGKTKKGAELSCGRTARSESRHSEKNLRVFRERKVSKGRRVIRRSHYTLRPGDTVVIGGEKHRAKGVHNKGTYVVTDAKKSVPVKKVEKIIHAGGYMPVK

SEQ ID NO: 25139 - protein, 451 aa, unidentified
  REGION 1..451: note = Erysipelotrichaceae bacterium SG0102
MSVCVVAPDKKPLMPTSEYRARKLLKSGKAVIFKYKPFTIMLTRIVSENMQPIEYCCDTGYKHIGVSIKSEKHEYFDCQFDMLQDEKKRHDDRRKMRRTRRNRLRYRKPRFDNRTASKKEGWLAPSLRNIRDQHIRIFERFLEVMPIVSATFEMGSFDVHAMHEFEATGTVLKGDDYQKGPRYGMNTLRKAVFYRDNYTCQVCGETADEGAILRVHHIGFETGDHTNRMSNLLTVCTKCHTSANHKPGGKLYDLKPRTKPFNGAAFMNAVRWQMFRTLKSTHPDLEWHMTYGAATQEARRVLHLEKSHANDAYAMGEFHPRRRTPFMHFQKLRRNNRILEKFFDAKYVDARDGKTKKGAELSCGRTARSESRHSEKNLRVFRERKVSKGRRVIRRSHYTLRPGDTVVIGGEKHRAKGVHNKGTYVVTDAKKSVPVKKVEKIIHAGGYMPVK

SEQ ID NO: 25140 - protein, 451 aa, unidentified
  REGION 1..451: note = Erysipelotrichaceae bacterium SG0102
MSVCVVAPDKKLLMPTSEYRARKLLKSGKAVIFKYKPFTIMLTRIVSENMQPIEYCCDTGYKHIGVSIKSEKHEYFDCQFDMLQDEKKRHDDRRKMRRARRNRLRYRKPRFDNRTASKKEGWLAPSLRNIRDQHIRIFERFLEVMPIVSATFEMGSFDVHAMHEFEATGTVLKGDDYQKGPRYGMNTLRKAVFYRDNYTCQVCGETADEGAILRVHHIGFETGDHTNRMSNLLTVCTKCHTSANHKPGGKLYDLKPRTKTFNGAAFMNAVRWQMFRTLKSTHPDLEWHMTYGAATQEARRVLHLEKSHANDSYAMGEFYPRRRTPFMHFQKLRRNNRILEKFFDAKYVDARDGKTKKGAELSCGRTARSESRHSEKNLRVFRERKVSKGRRVIRRSHYTLRPGDTVVIGGEKHRAKGVHNKGTYVVTDAKKSVPVKKVEKIIHAGGYMPVK

SEQ ID NO: 25141 - protein, 518 aa, unidentified
  REGION 1..518: note = Erysipelotrichaceae bacterium SG0102
METLLPDVSALQATAPESYEGGHHDMPKTKLEQELSETDYIYVLSADGDPLMPTRRRGHVKRLLNKGKARIVSHVPFVIQLKYDGSKNTQPLFGGIDPGRTNIGAAVVTPEGKCVYRSHTASRNRDVPKNMEARKSHRQASRRGERLRRKRRAKANGTTTEFPDGRMLPGYKKPVMVKDIVNTTAKFSYRKRPEKWLTPTANQLVQTHENLICRISAILPVTDWTIEANKFAFMQMDNGKCYGTDFQNGRMKGYKNSHEYVYIRQNGVCPMCGAPIEHYHHIIPRSRGGSDLPENILGVCMKCHARIHKGELRSDMKGVMKKYGSLSVLNQAIPYIWQWMTETYGEDHAHFCTGVETQTLRDDLGLPKDHDIDALCIACIGSGITPVRRLPRTFEIVQFCRHSRANINNQRERTYRLDGRIVCRNRHKRFEQKGDSLEEFRQKYPDQVSRLTVTKSTRYYNDADRLMPGAVFLFDGERYVLQSQLTGGRYYRAVGCEKRNFPAAKCTIIRENAGLVYV

SEQ ID NO: 25142 - protein, 410 aa, Tissierella creatinini
MVYVLNKDGKPLIPTNRHGKVKHLLKEGKAKVVKRTPFTIQLLYSTTEFVQPITLGVDAGSKIIGLSATTEDEELFSSEVVLRNDIVELLSTKRQNRRTRRNRLRYRKPRFLNRVKAKNKGWLAPSIRHKIDSHLKVIANIYKILPISNLIIETASFDIQKIKNPQISGTDYQEGEQLGFWNVREYVMWRDGHECQHCHGKSKDNVLNVHHKISRKTGGDSPGNLVTLCETCHSLHHQGKLTLKITKNKSYRDAAFMGIMRWAVYNKLKEIYPNVTMTYGYITKNNRITNGIEKTHTADAFCIAGNLKAKRSSVIYLQAFKRRHNRQIHKANFLKGGKKKLNQSPYMVKGFRLFDKVLFQEQECFIFGRRATGYFDLRKLDGTVIHKSASVKSIKLLEKKSTLLIERQVA

SEQ ID NO: 25143 - protein, 418 aa, Sulfobacillus sp.
MFVYVLNHHGQPLMPCSPRKARVLLQQGKATVVQRTPFTIRLRYGSSGYKQAVSLGVDAGTKHLGLSATTEKKVLFEADMMLRTDIQALLSTRRAFRRARRHRKTRYRQPRFLNRKKPEGWLPPSVQNKVDAHVKVIQSVLSILPITHITVEVAQFDIQKIKNPDIAGIDYQQGEQMGFWNVREYVLFRDNHTCQYCRGLSGDKILNVHHIESRKTGGDAPDNLITLCETCHDTIHRAGLTHLFQRPHESFRDAIQMTVMRWFIYRGIQKVFPHADVTYGYMTKNTRIRNCLQKNHLIDARCISGHPMATPLNETYLIKQVRGQNRQLHKATILKGGVRKANKSPKVVLGFQLFDKVRYNGQECFIFGRRLRGAFDLRLLDGTKITSGASHHKLMLLERASTLLIQLEKGEKAASSLA

SEQ ID NO: 25144 - protein, 407 aa, Succinivibrio dextrinosolvens; identical to SEQ ID NO: 12001

SEQ ID NO: 25145 - protein, 410 aa, Tissierella creatinini; identical to SEQ ID NO: 25142

SEQ ID NO: 25146 - protein, 431 aa, Methylobacter whittenburyi
MNKVFVLDREKNPLMPCHPARARQLLDRKRAKVFRLHPFTIILQDRAGGAVQPVEIKLDPGSKITGIAITVLGDNGRKLVWSCHLSHRGCTIKDSLQKRRGIRRSRRHRHCRYRQPRFDNRTRSDGWLPPSLISRVDNVFTWVKRLLSWTPGQCIHVETVRFDTQKLMNPEISGAEYQQGELQGYEVREYLLEKFHRVCAYCGLGDRPLEVEHVVAKANGGSNRVSNLALSCRDCNERKGTQRVEDFVTDAVKLERLRKQLKTPLKDATAVNATRYAIGNKLKNLGLPVRFWSGGRTKMNRIQQGYGKDHFIDAACVGDTGSRVFIPEALTPLTITAKGRGNRQMCLMDKFGFPRTRPKGVKQVDGFTTGDSVRLNQPRGKYRGSWTGSISIRASRVFDITTRNKEGKNQKISASSQHFIRLQGFDGYVYG

SEQ ID NO: 25147 - protein, 472 aa, Moorena sp.
VVSGADHVRGETTLISPDVGGVTTRPLAGERPRERHPSVFVLDKNQIPLQPCHPARARKLLNKGRAVVARHTPFTIRLKDRTIAESEVDGVQVGIDPGSKHTGIAVFTQHAGERRGRYAIQLDHRGARIRKKIGQRSAYRRGRRFRNLRHRAPRFANRTRPQGWLAPSLRHRVENTTGWVDRLTRWAPVKAVHVERVAFDTHALSAGKPLEGVEYQRGTLHGYEVREYLLAKFDRACVYCGATNTPLNLDHVHPRSRGGSDRVSNLVLACVTCNQAKNNRPVEEFITNKQVLARILARAKAPLRDAAAVQSTRWALWRALNERLPTHVGSGGRTKWNRTRNHLPKTHTLDALSVGKIDTITQTTNRVLVAGCAGRGSYARTRPDKHGFPRLRLPRTKEFFGFSTGDLVRAVVPQGKKTGTYTGRVAVRASGSFNITTTQGTVQSIRYKHMRLLQRADGYGYTWKGEGVSSRS

SEQ ID NO: 25148 - protein, 422 aa, Petrotoga mobilis
MLVYVLNKHGEPLMPCKSSKARKLLKDGKAKVVRKEPFTIQLLYGSSGYKQPITLGVDAGSKTVGLSATTKKKELFASEVEIRDDITKLISQKRQYRRDRRLRKTRYRKPRFLNRVHSKNKGWIAPSVEHKIKSHIKLIDLVYRLLPITKIVVEVASFDIQKIKNPNIEGKQYQQGEQLDFWNVREYVLWRDNYTCQHCKGKSKDKRLNVHHIESRQIGGNAPSNLITLCETCHRDYHNGKIKLNFKRGQKFKDATFMGIMRWTLYNRLKDLYSNVHLTYGYITKNTRIQNNLPKTHRIDALCISGHPQAKQLDYYYHIKEVRRHNRQIHKANILKGGTRKLNQAPYLVHGFRLFDKVRYNGIECFIFGRRSTGYFDIRKLDGTVIHRSAKSKDLILVSKAKTLLWERRENSAFLSPLPYLP

SEQ ID NO: 25149 - protein, 436 aa, Petrotoga mobilis
MLVYVLNKYGKPLMPCKPSKARKLLKEGKAKVVRKEPFTIQLLYGSSGYKQPITLGVDAGSKSIGLSATTENKELFAAEVEIRDDIPKLISQKRQYRKGRRFRKTRYRKPRFLNRVHSRKKQKQADATQPYGRQGNWLAPSVEHKIKSHIKLIDLVHSILPITTIVVEVASFDIQKIKNPNIEGKQYQQGEQLDFWNVREYVLWRDNYTCQRCKDKSKDKRLNVHHIESRQIGGNAPSNLITLCETCHKDYHDGKIKLDFKRGQKFKDATSMNIMRWTLYNRLKDLYSNVHLTYGYITKNTRIQNSLTKTHRIDALCISGHPQAKQLDYYYHIKEVRRHNRQIHKAKILKGGIRKLNQAPYLVHGFRLFDKVKYKGIECFIFGRRSTGYFDIRKLDGTVIHRSAKSKDLILVSKAKTLLWERRENSAFLSPLPYLP

SEQ ID NO: 25150 - protein, 391 aa, unidentified
  REGION 1..391: note = Bacillus sp. FJAT-29814
VGFTTSLTNLNEGNSLTVVLPVQTEEDSQSKKRARRSYRRSRRNRKTRYRQARFLNRKRPEGWLPPSLMARVNNVLSMVNRFKKLVPLSDCSLELVKFDTQKMMNAEISGIEYQQGTLQGYEVREYLLDKFGRRCAYCGTKDVPLEIEHVHPKSRGGSNRVSNLTLACRECNEEKDNLTLDEWSIRLANKKDKRSKWILSSLPTIIKQLQKPLKDTAVVNSTRWKLYECLIGTSLTIECGTGARTKMQRIQHELTKEHYYDAVCIGESTPTEPLLFKTNQVLQIKAKGRGSRYRSGTDKFGFPIRQMPRIKMIHGFMSGDMVKAIVPKGKYQGTWFGQIAMRSSGYVDIKDKNGKRMVQGIQAKYCQIVQRFDGYSYFVEKRKESAIPPHA

SEQ ID NO: 25151 - protein, 451 aa, unidentified
  REGION 1..451: note = Human gut metagenome
MFVAVISKTGVRLMPTSEYRARKLLNSGKAIIYGYRPFTIQLTERETGALQPVELCVDTGYIHIGVSVKSEKHEYLELQVDTLTNEKKKHDERRMYRKQRRNRKRYRKPRFDNRKRESGWLAPSLRHKKEVHLQVITKICDVYPIADITLEMGNFDTQVLKAQEKGKPIPQGTDYQHGERYGIATLREAVFTRDEYKCQCCDRGIKDGAILHAHHIQYRSQGGTNRMSNLITVCEKCHTPANHKPGGKLYGWKPKIASFKDATYMTAVRWQLYRKVKEMFPGIHVKITYGAETKERRRILDIKKSHVNDAFVMGQFHPKHRSLPVLYKKKRRNNRCLEKFYDAKYIDSRNGKTRSGQELFNGRISRNHKKDSENLHRYRKKKVSRGKRNIRVQRYKIQPHDIVLFDGKKYETTGCHNKGTRAILLPEKKSKSVEKLTIYKYAGGYYPSKFA

SEQ ID NO: 25152 - protein, 517 aa, unidentified
  REGION 1..517: note = Leptospirillum ferrodiazotrophum
MLPQSRALEAADADNREGQDETVGGKGAIPKPVANIPEGRRFERSALRPQGQNNVRFDGGFVQVFVLDKKKKPLMPCHPARARELLREGRAVVHRIAPFTIRLKDRIGGETQPIRVKLDPGSKTTGLAAAREEETDGEKTAHVLFQAEIHHRGSAIKKKLDQRRAFRRRRRSQLRYRTPRFDNRTRPDGWLPPSLRHRVDTTLAWVERLRRLVPVSELSQELVRFDMQKIENPEISGIEYQQGTLAGYEVREYLLEKWGRTCAYCGSENVSLEIDHIHPRSLGGSDRVSNLTLACRSCNLKKGNRPVGEFLAKTPERLSTILARAKAPLKDAAAVNTTRWALFQALKATGLPVEVASGGRTKYNRTRLGIPKGHSLDAACVGKVDRIEGWNRPCLSIKATGRGSYQRTRLDAFGFPRGSLTRTKAHFGFQTGDRVLAIVTKGKKTGTYAGRVAVRSSGSFNIQTGSRVVQGISYKDCRLLQRADGYGYSIHPITEKGEAGEALPLPGMNAGVSRARG

SEQ ID NO: 25153 - protein, 440 aa, Methylobacter whittenburyi
MAVFVLDKKGKPLMPCSEKRARLLLERGRAVVVKRYPFTIRLKDRVGGDTQPLRIKLDPGSRQTGLALVREHDRVDADTGELKTHLTVLSLFQLNHRGRMISEHLTARRAMRRRRRHNLRYRAVRFNNRTRHKGWLAPSLQHRVDTVMSWVNKLRRLAPVTALSQELVRFDLQQLENPGISGIQYQQGTLFGFEVKEYLLAKWGRQCAYCSQSEVALEVEHIVARARGGSHRISNLTLACRPCNQAKGARTIEDFLRHQPELLKQILAQAKAPLKDAAAVNSTGWALFNALTATGLSVSTGSGGLTKFNRKQHLIPKSHALDAACVGRVDSITHWNRPVLAVQCMGRGSYQRTRLNQYGFPRSYLMRQKAVKGFQTGDMVKAVVSKGKKAGEYVGRIAVRASGYFNIHTPTGTVQGISHKACTLIARNDGYGYHLQPKIA

SEQ ID NO: 25154 - protein, 449 aa, unidentified
  REGION 1..449: note = uncultured Erysipelotrichaceae bacterium
MKTVFVIANDGTRLMPTNIKRARRLMKRREAVICRHDPFTIKLTRDSEHNVQDIEFKQDTGDKHIGISVCSEKHEYISAQYDPLKDETKKHNDQRKYRRTRRNRRRYRKPRFDNRKKDRGWFAPSIEHKKELHVRLFEKYNDVCPIKKAVFEVGSYDIHAMQEYEQNGAVLTGTDYQKGPRYGMTTLREAVLYHQNYICPLCRKSLIGARTAIHHRGFRTGDRSNRLNNLMAVHAWEHTSANHKPGGLLWDIKPDHRPFKGAAFMNIVRKAIADEIEKRHPNVAVIRTYGAETKLRRQDLHIRKSHANDAYAMGEYHPKHRSQTMHFQKHRRNNRILSKFYDSKYIDVRDGRKKSGAELSCGRTNRCVPRNNPENNRVFRGQKLAKGRVSVRRRRYPINSEDAVIVNRKKLIASGTAHYGEYVHFGKGHKDVKTSQVRIRCHAGGWVQI

SEQ ID NO: 25155 - protein, 431 aa, Methylobacter whittenburyi; identical to SEQ ID NO: 25146

SEQ ID NO: 25156 - protein, 437 aa, Methylobacter whittenburyi
MTGNRQLFRFTGMNKVFVLDREKNPLMPCHPARARQLLDRKRAKVFRLHPFTIILQDRAGGAVQPVEIKLDPGSKITGIAITVLGDNGRKLVWSCHLSHRGCTIKDSLQKRRGIRRSRRHRHCRYRQPRFDNRTRSDGWLPPSLISRVDNVFTWVKRLLSWTPGQCIHVETVRFDTQKLMNPEISGAEYQQGELQGYEVREYLLEKFHRTCVYCGLGNRPLEVEHVVAKANGGSNRVSNLALSCRDCNERKGTQRVEDFVTDPVKLERLRKQLKTPLKDATAVNATRYAIGNKLKNLGLPVRFWSGGRTKMNRIQQGYGKDHFIDAACVGDTGSRVFIPEALTPLTITAKGRGNRQMCLMDKFGFPRTRPKGVKQLDGFTTGDSVRLNQPRGKYRGGWAGSVSIRASRVFDITTRNKEGKKPKDIGVQSTFYSAARV

SEQ ID NO: 25157 - protein, 454 aa, Methylobacter whittenburyi
MREDMAVFVLDKHKRPLMPCSEKRARLLLERGRAVVVKRYPFTIRLKDRVGCDTQPLRIKLDPGSRQTGLALVREHEDVDADTGELKTHLTVLSLFQLNHRGRVISEHLTARRAMRRRRRQHLRYRAPRFNNRTRPEGWLAPSLQHRVDTVMSWVNKLRRLAPVTALSQELVRFDLQQLENPRIAGFQYQQGTLYGFEVKEYLLAKWGRQCAYCSQGEVPLEVEHIVARARGGSHRISNLTLACRPCNQAKGARTIEDFLRHQPERLKQILAQAKAPLKEAAAVNSTRWALFNALTATGLSVSTGSGGLTKFNRKQHLIPKSHALDAACVGRVDAITHWNRPVLAIQCMGRGSYQRTRLNQYGFPRGYLMCQKAVKGFQTGDSVKAVVSKGKKAGEYAGRIAVRASGYFNIHTSTGTVQGISHRDCQLMARNDGYGYHLQPKIAANGDCENRIG

SEQ ID NO: 25158 - protein, 391 aa, unidentified; identical to SEQ ID NO: 25150
  REGION 1..391: note = Bacillus sp. FJAT-29814

SEQ ID NO: 25159 - protein, 428 aa, Ktedonobacter sp.
LMVCVLDQKKRPLMPCTPKRARLLLARGRAVVHRVQPFVIRLKDRRVEDSVLQPIALKIDPGSKTTGMALARVEATEEGEVHRALFLCEVQHRGQRVHDHKVTQANARRRRRSANLRHRAPRFDNRALPQGWLPPSILSRVGNVVTWTDRLIRWSPVTRLEVERVRFDTQLLQNPEIDGVQYQHGELAGWEVRAYLLIKYEYRCAYCGKTNLPFEIDHIRPRSRGGSNRVSNLVLACHACNQAKGSQTASEFGHPEVEARAKAPFKDAAAVNASRYKLVEALSVFGLPLGTWTGGRTRWNRVRFGVEKSHALDAMCVGELAGVQFHTPNTLTIMATGRGRHCRTNFTKYGFPSSYLTRKKQVRGFKTGDRVRAVVPASFKTAGTHVGRVQVRKSGSFDIETREREVDGVHAKYCSLVQRADGYDYAIS

SEQ ID NO: 25160 - protein, 437 aa, Methylobacter whittenburyi; identical to SEQ ID NO: 25156

SEQ ID NO: 25161 - protein, 454 aa, Methylobacter whittenburyi; identical to SEQ ID NO: 25157

SEQ ID NO: 25162 - protein, 440 aa, Methylobacter whittenburyi
MAVFVLDKHKRPLMPATEKRARLLLARGRAVVVKRYPFTIRLKDRVGGDTQPLRIKLDPGSRQTGLALVREHDRVDADTGELKTHLTVLNLFQLNHRGRVISEHLTARRAMRRRRRQHLRYRAPRFNNRTRPEGWLAPSLQHRVDTVMSWVNKLRRLAPVTALSQELVRFDLQQLENPGIAGIQYQQGTLYGFEVKEYLLAKWGRQCAYCSQSEVALEVEHIVARARGGSHRISNLTLACRPCNQAKGARTIEDFLRHQPELLKQILAQAKAPLKDAAAVNSTRWALFNALTATGLSVNIGSGGLTKYNRKQHQIPKSHALDAACVGQVDAITHWNRPVLAIQCMGRGSYQRARLNQYGFPRGYLMRQKAVKGFQTGDSVKAVVSKGKKAGEYAGRIAVRASGYFNIHTPTGTVQGISHKACTLIARNDGYGYHLQPKIA

SEQ ID NO: 25163 - protein, 440 aa, Methylobacter whittenburyi; identical to SEQ ID NO: 25162

SEQ ID NO: 25164 - protein, 440 aa, Methylobacter whittenburyi; identical to SEQ ID NO: 25153

SEQ ID NO: 25165 - protein, 471 aa, unidentified
  REGION 1..471: note = Candidatus Diapherotrites archaeon
METKQQQLFKRNTYTPKDASQVFGSVVLSLNREETLSEQDLKTLDNSLDVNIQSGKTEQNLRVFVLNMQKKPMMPCKPAKARHLLQQKKAEVVSCKPFTIQLTIPTGETKQEITLGIDSGYKNIGFSATTQKRELVSGELELRTDVSKKISERAMYRRGRRNKLWYRKPKFLNRVKTKCKNWLAPSVQHKIDTHIRLVEKIKILLPISKVIVEVAQFDAQKLQNVDIQGVEYQQGQTQGHDNLRAFILQRDGYTCQICNKKDGMFNIHHIIQRRDGGSDRPDNLVTVHKSCHDDFHSGKIKHTFKKPKSFKETAMMNNIKKFVVDKLGCNCTYGYITKRKRIENNLEKTHYNDAFVISGISNQKRTKPFFSKQIGRNNRCLQLNRKGFKPSIRKQRYSFQPNDIVEFEGNKYLTKGSHNKGTRIIIVRDNKNKSVSIKKVRIICFGKGIVFSTRQFLTTLKDGVSLPQTIR

SEQ ID NO: 25166 - protein, 472 aa, Moorena sp.; identical to SEQ ID NO: 25147

SEQ ID NO: 25167 - protein, 525 aa, unidentified
  REGION 1..525: note = Human gut metagenome
VSLPVKQVNRDKTSTGNSFKAPQRARRRTCRSAGAEQGRNCHLERNIIMIIALDKNKRPLGFLTERRCRILMERKRAVLYRVFPTVVILMDMDVRKLRDLPSYRIKIDPGSKYTGIAIVRNDTDELVYAMQIEHRGDAVRAGLQKRKMARRNRRSRETGYRRAKWGNRCLSDGDKKSYNSSRKDGWLPPSIRSVADNVLTWVQRLSRWVNITDCSLEAVRFDTQLLENPNIKGEEYQHGTLFGYEIREYLLEKFGHTCQYCGGESGDPVLEWEHIHPKSRGGSNRVKNALLSCSSCNRDKDNQTPEEWIGQVSFRLSHEKGKKRELDSKRIELIQKVIDGKPEGQPMRYAAWVSSSRRYLENHLFQIFRDVECSSGGRTKYNRTKLGYPKEHHYDALCIGTVPEKGYHDRTNGYYLYAKATGRGTRLRGTLNKCGIIVTKWTSRKKNFFGFQTGDIVVAEVPHKTPKPYKHEGRFVGRVMVRASGSFDIRTTGGRLATVKAGFCRLLQANSGCAYSMERAISLGH

SEQ ID NO: 25168 - protein, 418 aa, Sulfobacillus sp.; identical to SEQ ID NO: 25143

SEQ ID NO: 25169 - protein, 473 aa, Streptomyces sp.
VREETRTASPGDAGITPNHPVGEKPRERHPFVFVLDKHGTPLQPCTAARARKMLKKGRAVVHRHTPFVIRLKDRTAAQSETDGVEIGIDPGSKHTGIALFTARAGERRARYSVQLDHRGATIRKKLEQRAAYRRGRRTRNLRYRAPRFLNRARREGWLPPSLRHRVDTTVSWVSRLARWAPVRAVHVERVAFDTHALAAGRPLEGAEYQRGTLHGYEVREYLLAKWNRTCAYCGATGVPLNIDHIHPRSRGGSDRISNLALACLPCNETKSNRLVDEFLAHKPNLLARIKAQAKAPLRDAAAVQSTRTALWRALDARWPTHTASGGRTKWNRTRCHLAKTHTLDALAVGTLDTIAETVTTVLLAGCIGRGTHTRTRTNKHGFPRLRMPRRKRFFGFATGDLVTAHVPTGKKAGTHTGRVAVRTTGSFNITTRHGTVQGIRHKHVRLLQQADGYAYTTLPEHSTAIPRRTAPED

SEQ ID NO: 25170 - protein, 413 aa, unidentified
  REGION 1..413: note = Candidatus Acidulodesulfobacterium acidiphilum
MLVYVLSIDGKPLMPCKAAKARKLLKQGRAKVVKRTPFTIQLNFDCENQVQDVKLGVDTGYKHVGLSAVSSDKELFRSEVELRTDIQKLLSEKRQYRRTRRNRLWYRKARFLNRGIKAGWLAPSVEHRLNEHVKAVDFVKSILPVSEITVEAAVFDIQKIKNPDITGTDYQNGDQKDFWNVREYVLYRDGHKCQACNGKSKDKVLNVHHIESRQTGGDRPDNLITLCESCHKAYHKGKIELKVKKHKAFKAETIMSILRWKIVNKLRELGNAVSITYGYLTKSSRIALKLEKSHANDAFCIAGGSGQERTDNNYFIKYVRKCNRSLFKANLLKGGKRKVNTIKQAFGFHRFDKVLYGKIECFIYSLRSSGYFDLRLLTGEKINASVKYIKLRLIETFKTRRIALLPCMGVSEL

SEQ ID NO: 25171 - protein, 396 aa, unidentified
  REGION 1..396: note = Museum specimen metagenome
MVYVLDKSGKPMMPTKRYGWVRRALRDGRAKVVRRDPFTIQLTYEPDTHVLQDTTLGIDIGYENVGTSVLTKQKELFSGNFKLRTDIQKRLSYRRMYRRTRRGRKTRYRKARFLNRKKYYADAPSVRHKVHSHVRIINLITSILPVNQLIVEVANFDAQKIKNPDIQGEEYQQGCQLGYQNVKEYVKSRDCHRCYFNTGKCSKKLEVHHIVFKSQGGSDAPSNLITVCDKCHKSIHDGKKPNPKASKYKSLRPISFMKTVSKRLQEMLPDIEYTYGYQTKQKRYNLNLGKSHVNDAFVIANGTSQVRCKTTNYVFKRKNNRQLGKLRKGFAPSSRKQRYPIQPKDLVEYEGKKYYAIGTHCKGKRVIVMYNGKKKSIAIKIIKLLFNQRSLLALTG

SEQ ID NO: 25172 - protein, 443 aa, unidentified
  REGION 1..443: note = Human metagenome
MTKTLTKQTTQACVLDQNGKPLMPTKRLGKVYRLLKTKKAHIVSYEPFTIQLDYEPDTHAIQPMTLGVDSGAIHSGYSVANEQREYYSSEVIARDNISYRISDRHMYRQNRRSRKTRYRKPRFNNRKNKKKGWLPPSLEQKVAVQLNEIDHLHRYFPIETIIVEVAEFDIQKIKNPDISGKDYQQGTLQGYNIRNYLLEKHSRKCFYCDKEVSTFEVEHMIPKARGGSNRIDNLTLSCHKCNQKKGTLTADEFIKRTLPVENAAKKLKQLSKEKRLFKYMAHMNATRWTLYNAINDKYSNVKITYGYVTKYNRIQAGLPKAHHIDAKCITGFAQVPSFDTTVVKMKMRRHNRQLHRATFSKGHVRKAASLPTVMFGFRLYDIVMYNNHQYYIKGRRSNGSFALVSVEGLKEENRTYKKLTFLAHTNAYLTNRYVNNEIVNANN

SEQ ID NO: 25173 - protein, 473 aa, Streptomyces sp.; identical to SEQ ID NO: 25169

SEQ ID NO: 25174 - protein, 438 aa, unidentified
  REGION 1..438: note = Synergistales bacterium
MYVFVLDKHKKPLTPCRPSRARHLLGSGRAVVHKRFPFTIRLKDRTAEESVIKPVRVKVDPGARFTGIAIVREDRQGGPRLIAGIELEHRGNAIRDNMTKRAGYRRRRRSANTRYRAPRFDNRRRPEGRFPPSLRHRIDTTVSWMRRLTRIAPVSGFSVESVKFDTQKMLDPEVSGKEYQQGELEGYEVREYLLEKWCRKCAYCNAGNVPLQVEHIVPRARGGSDRVSNLTLACERCNRAKGARPVKEFLHDKPALLGRIRAHAKAPLSSAAAVNSTRNALFGEMRAFGLPVETGSGGLTKYNRTRLGLPKSHVLDALCVGTVSSAKVLTDSVLHVRCTGRGRYSRTLTDKYGFPRAYLPRGKRFFGFATGDIVRTAVPKGKYKGTWTGRVAVRESGWFALSTGKNTPDGKKERVNVKWDTCKILERNNGYEYSVIAV

SEQ ID NO: 25175 - protein, 445 aa, unidentified
  REGION 1..445: note = Fermentation metagenome
MKCIYVINQDGKPLMPTKRLGRVSRWLKSGQAHWYKNRRDTIQFNRKTTNYVQEVIQGCDLGDHLGMSVITNNQEVYASESYCNGKQTHRLMQKRKELRRTRRNRLRHRKPRFDNRKKKGYAPSIQRKLDFQIKEIKRLDEFLPITKRVFEGSTFDINKITHHAQLQKGYKTTFDFLYDRDHGCDALDGKHYPKKNMVIHHLVQRHNGGTNNPDNLVLLARKNHTQVNHKNGVLDKLAKQRQKKYKNADTRGAYFMNVLGKELPKYFDFVPTYGYITAKKRKKYGIAKTHHDDAFVIAGGTNQTKRFDTCFYREKQRLNNRSLEKFYDAQYRDLRTGEKEKGAVLSSGRTRRSLKDPRNNQRVFRANKLKKGRRTIRKQHYQLRPKDLVSYNDKIYRVKGMQNNGTRVLLITSAKDKSVAIKNVKYLFHINGVYQTERRTTAFIS

SEQ ID NO: 25176 - protein, 507 aa, unidentified
  REGION 1..507: note = Human gut metagenome
MSEYIYVIGMDGDPQMPIKRKRHVEKMLQTGRARVFRQVPYTIQLTYKNQPVLQPVTIAEDPGRSNIGMAVVSLSGELLSAAVVQTRNKEIVKLMEKRKLHRRASRNGERKARQRLAKRCHTMLKAGFLMRKLPMYRKDKRVKCLVIRNTEARFCNRKREDGWLTPSAEHLVRTHINLIHKMQKFLPITDVAIEINRFAFLSLEDPSISGVDFQNGPLKGYDDLNAAVEDLQDGHCLMCNSLIEHRHHIVPRSMQGSNTIGNIAGLCCKCHERVHKDARFEDRLKKKKAGLDKRYAAVSALNQAIPFICKRLEQEFGKEHVHYCSGRDTAMVRRSFGYHKTKEEQLHVVDAWCIAVLSLRQIPEKAPEFDHVHEILQFRRQDRSRIKAQTSRAYYHEGKKIVRNRKKAEGQGEDSLQEWRKRQVDRYGEEQTRKMISQLKVKKSIRRYNRLDRLMPGAVFYYQDVRYVMRGQHCEGTYLQAVGMGSKDFPAKKCKIVANNEGLVFVS

SEQ ID NO: 25177 - protein, 470 aa, Moorena sp.
MCREAHVTAERREQRSNPIQSQVFVLNQEGQPLMPCHPARARQLLKKGRAVVHRAVPLVTRLKNRTKAIVQPVRLKVDPGSKATGMALVRHQPSDSITVLSLFELQHRGHQISESLTARRHMRRRRRGNLRYRAPRVLNRARSAGWLPPSLQHRIDTTLAWVKRLQRFAPIKNISCELVRFDMQAMQNPEIDGTAYQQGTLTGYEVREYLLETFGRQCVYCEAKDTPLQIEHIQPKALGGTNRISNLALACRSCNQKKAAQAIETFLADKPEIPRHIRKQAERPLKDAAAVNSTRWALTQALRSTGLPLELASGGRTKYNRERLNVPKTHALDAACIGEFRVLKGWRRSTLHLRCTGRGRYQRTRLSKDGFPVGYLMRHKRVNGFQTGDLVEAHVPSGKKAGTYQGRIAVRVSGSFNIRTDEEVIQGISYRYCKLIQRGDGYGYIVRPQMTSHKAQSMRPALNAALFHPQ

SEQ ID NO: 25178 - protein, 449 aa, unidentified; identical to SEQ ID NO: 14177
  REGION 1..449: note = uncultured Clostridiales bacterium

SEQ ID NO: 25179 - protein, 483 aa, unidentified
  REGION 1..483: note = Human gut metagenome
MNRSDKSVLVIGMNGIGLMPTTPRKARLLIRQKKAEVVRKMPFTIRLRYKTGSATQHVELGIDTGSQHIGVAVAADGKVLQKSEHVLRSTMDKRVLNEKRKAQRRSRRYRKTEYRHPKFSQHTKYVYVEKTVTRKKHKTHWKKISNRYGTNRKEGWLPPSIQQKIDMHIMIIRRYQEALPLDTSTNIEIARFDIQKINKPDIEGIGYQLGRMYQFENVKAYVLWKHSYRCPVCGTEFGTKRKSDGIMALPELHHKHFRSRGATDNPDEYMPVCTVDHRAAEHGDSGILGKLRKAEEKTIRGQRDMTFMNILRKRMWEAFPTAVFTYGNVTNADRKTIGLSKTHANDAVAIAMHRQILSGVRSVADAADTTYYKQVRKKKRSLHEATARKGRARPNTAAKRNAKNTKSLTVKGKKYCLRDKVEYNGQIAWIAGFSGKTGCRIQSIDDKYLSQPGKSYTSINLSDVNVLNHNNNWIVGSIQEKSI

SEQ ID NO: 25180 - protein, 460 aa, unidentified
  REGION 1..460: note = Candidatus Acidulodesulfobacterium acidiphilum
MKKMQKLLTRRITDTPTDTSLVRSNCGLSLNKEETLSAAGLKTVNNNPEENLLSGRRGRNPRVFVLNMRGKPLMPTTAGKARKLLRKGLAKVIMRTPFTIQLTYATGETKQPVSLGVDTGYKHIGLSAVSSAKELFRSEVELRTDIPKLLSEKRQYRRTRRNRLWYRKARFLNRVKSKKAGWLAPSVEHRLNEHIKAVEFIKSILPVMEITVEAAAFDIQKIKDPDISGVEYQNGEQAGFWNVREYVLYRDNHICQACNGKSKDKILNVHHVTPRADGGTDRPDNLITLCESCHKAYHKGKLELKIKKHKTFKAETIMSILRWKIVNKLKELGYTVSITYGYLTKSARIALKLEKSHANDAFCIAGGSGQERTDVINGSFTRRQNRCTQLNRKGFKPSIRKVRYKLQPNDLVRFNGKAFLVKGMQNLGKYIKLAGLKKPVKTELVNLIKYGKGLQFIPAL

SEQ ID NO: 25181 - protein, 426 aa, unidentified; identical to SEQ ID NO: 10545
  REGION 1..426: note = Ga0373625_0000621

SEQ ID NO: 25182 - protein, 487 aa, unidentified; identical to SEQ ID NO: 10077
  REGION 1..487: note = uncultured Clostridiales bacterium

SEQ ID NO: 25183 - protein, 509 aa, unidentified
  REGION 1..509: note = Human gut metagenome
MPDTDYIYVLGVDGKPQMPTKRKRHVKRLLNTGKARIACHVPYTIQLLYENTPVLQPVMLAEDPGRTNIGMAILSIKGELLMSAVVETRNREIVRLMNHRRGYRRASRIGERKARQRLAKRFGTMLKAGLIMRKLPKFAADKFITCHCIKNTESRFFNRKHPDGWLTPTSRQLVETHINLMHKIQKYLPVTDIAMEVNRFAFLSLENPSVSGVDFQNGPLKGFDSLHDTVNELQHGKCLLCDKKIEHYHHIVPRSINGSNTIGNIAGLCMECHDKVHKCAAYQKKLNDVKKGLDKKYGALSALNQAVPFICKCLEAEFGREHVSYCTGRDTAKMRSSFGFQKTKDNQMHETDAWCIGILALNKIPNVVPDFGQTYCIRQFRRQDRSLVCAQTERVYKLDGVTIAKNRKKRTEQKTDSLDDWYNRQVTLYGKKKADFMRSRLTVIKSKRRYNDLTRVMPGAVFMYNGECHVLSGRLTEGQYFRAVGDTKTNYPASKCKIIRHNEGLVFVC

SEQ ID NO: 25184 - protein, 600 aa, unidentified
  REGION 1..600: note = Viral metagenome
LSTTPFLRDGACGKVLQAQVDQTEILERRWDKISTLHTSKKTNPGMPPQSQALESVSADNRKGKDETGHGRRGNTTTGMQHGREDRFLELTSPRNSHTATPEQSERAEARGVIAPPSSTASRVFVLDKHGNPLMPCHPARARKLLKSGRARVHRLAPFVIRIVDREIEQCEVPGVVVKIDPGSKHTGIACARVDEAGITHGLVSIQLDHRGQFIHEKMGQRARYRRRRRSVNLRYRAPRWRNRHPQACRACGKNAKHNKGYCGPCIQKRDFVDNGYRQYRLPPSLFHRVTTTTSWVNRLSRWAPVTSLSMELVRFDTQAMQNPEISGVEYQQGTLAGYEVREYLLEKWNRKCAYCETSGTPLNIDHIVTRSRGGTNRISNLTLSCRDCNESKGSEDVETWCERHFRRQNGRKIANKVTAQAKALLKDTAAVNSTRWALWRELLKAGLPVETGTGGRTKWNRKRFGVPKSHTLDALCIGNIDSIGSVPNNILIVACIGRGKHQRTTLNKYGFVRSRLPRTKTHHGLRTGDFVRAAVPNGKYKGVHVGRVSIRSSGRVCVSKVDGISYKNCSVLQRADGYGYSREKEALLIPAQEVGVSKAR

SEQ ID NO: 25185 - protein, 445 aa, unidentified
  REGION 1..445: note = Human gut metagenome
LLVLLVHNTKELKSKKGAVYNMVYVISKDGQPLMPMRRHGKVRRLLDSKRAKVVRRDPFTIKLLFETEKTEPSLTLGVDTGSSKIGCAVVTPKKEVLYISEVEIRNDVTTKMERRKVYRRARRDRKTRYRKPRFLNRGNSTKKDRLNPTMISKINSHIREIEFIKSILPIKQIVLETATFDPHLLKMQEENKPFNRHWGYQKGPNYGFGNAKAACLNRDNYTCKCCKTKKGTLHVHHIIYRSNGGADTLDNLITLCEECHKKLHNGELKSFESKLIGKKKGDLKHATQMNIIRSRLLKHYPEAIETFGYITKENRQFIGLGKTHYNDAVVIAMGSLDKPKFKTDVLYKKKHVAKGQYQLHQGQRSEIKLPKGKIRGFLNRDIVNYRGQSYLIKGLMSSGYCILTDIDGVIQKFENPKTVKLNSIERISARNTTRCIRQKIMQNTA

SEQ ID NO: 25186 - protein, 433 aa, unidentified; identical to SEQ ID NO: 22039
  REGION 1..433: note = Terrestrial metagenome

SEQ ID NO: 25187 - protein, 446 aa, unidentified
  REGION 1..446: note = Human metagenome
MEYVYVLDKNGSPLMPTSRCGKVRKLLKNGEAKVVKREPFTIQLLKETTNNTQPISLGVDTGAAYVGATAIGNSKTYYKAEVMLRADIKKKMDNRRQSRKFRRNRKTRYRKPRFLNRGNSIKKDRYSPTLISKFQAHTREIEFVKSILPITQLVLELGQFDPHALKDPSVRNQKWKYQKGVNYGFQNTRHAVLARDNYTCQCCGKRNCRLEVHHIKFKSQGGTNDEENLITLCKECHDGVHASRIELKKKGIKKNIGLAAASQMNVLKCMLQREYQEAEIVYGYQTNVTRELMGLSKSHINDSIAIASMGELDIDTQGQEYKKRVVPVGDRILAKGVRSEKFIPKGKIAGFHRYDKVEYLGEEYFIKGRSKTSPFRLMDIYGNLCTFENKSHYKYAQTKKLKRISARSSVLCTREETTQVETRNNYYLLSSLKIPTFSNNCCIIIL

SEQ ID NO: 25188 - protein, 459 aa, unidentified; identical to SEQ ID NO: 10972
  REGION 1..459: note = Terrestrial metagenome

SEQ ID NO: 25189 - protein, 462 aa, unidentified
  REGION 1..462: note = Human gut metagenome
MSVLVIGQNGRALMPTTTRKARILLKENKASVVCRHPFTIHLWYKTGCATQEGSIGIDTGSQHIGVGVTCRNKVILKDEHELRSSMEKRSLMETRATMRRGRRYRKVRYRKPKWRHHTKRMYFEKANRKGQHWRKVKTTTQSPRPERWLPPSLQSKCDHHFRIIDRYLKYLPDSITKNLVIEVGRFDMAHMNDPTIHGEMYQRGPMYDTENLRAYIFARDGYKCACCKAKAGSIRKKDGTSVKLVAHHIQFRSRGATDNPKYMISVCDHCHTTKAHQLGGILYSWMETNKKVTRGLRDATFMNILRRRLFDGYPQAAFTYGNITAVDRKRLLLPKSHANDAVAISLFGKDVSVINATCQTLRYKQVRKSKRSLHEATPRKGRKEPNTKAIRNKKNTTHVNGFKLWDSVLVNGQKLFICGFTGSSAYLVDQDGHYVSPPGKTYKQWTLSKLSRLHPNGNWLMA

SEQ ID NO: 25190 - protein, 456 aa, Moorena sp.; identical to SEQ ID NO: 12190

SEQ ID NO: 25191 - protein, 467 aa, unidentified
  REGION 1..467: note = Human gut metagenome
MKVFVIGMTGKRLCPTSPSKAKKLLKTGKAHVYRRVPFTIRLDYKTGGSAPPLKLGIDTGEQHIGTAVCNDATVFCKSEIELIKSMEKKKRLEKRKIYRRSRRYRKTRYRHPKFRFRTKRIYVEGGYRKRKGGKMVLRHWKKVPNTVMTNRHEGWLPPSIESKVKHHIDWINRYMDVLPDGTMLGIEVARFDIARMKDPSIRGELYQFGRMYGRENTKAYVLAKFDYTCPICKKKFDRDRKPRMHHVTMRKNAATDNPDEYAPVCVLCHSGEEHLPGGVLDKLAKECRRREYREPTFMNILRRRLFETYPEAEFTYGNITNADRKMLGLEKTHANDAVSIAMHGAKKVIDCEDTVYYRQVHRKKRSLHKATPRKGKKEPNHTAKRNVKNVPYVGKFHINDKVKGPDGNIGFITGLTGSAAYITDFIGEYIYPEGKDYKQHTLSSLRYVHHCGNWITSSVSGAAVSHD

SEQ ID NO: 25192 - protein, 473 aa, unidentified
  REGION 1..473: note = Human gut metagenome
MVAVVTNTGKPLMPTSTYRARKLLKGGRAVIYKYRPYFTIMLVDRAEGEVQDIEYKSDTGSKHAGISACTEKQELLSEQRDLPDKEPEHHKEQQRYRRGRRNRKRYRKPKFDNRKKKPQEGHEKWLAPTNLHKLEIQVNLFKDFCQVVPVTSAYFEMGKFDTQVLKAVLEGRPIPQGEDYQRGEQYGTDTLRAAVFLRDDYTCRICGRTIKDGAILHVHHVGYWMQDRTNRPANLATVCEQCHTPANHGRNGILYGRKPEHGTLKDASYMTSVRWIMLKELKDAAPEVSIHVTYGVTTKRKRQGLHLPKSHVNDAFSMGRFHPKKRADTAYWKKTIRHDRSLQKFYDAVYLDTRDGREKKGSELSNGRISRNHKKDSENLHKYRGHKVSKGHVSIRRDGNKLKPGSVVLYNGERLTVHGTHTSYRKNKKGEEVKNVNVQFTRPASDGKKSASLKKCKIVTRNYNTGWKRYRPA

SEQ ID NO: 25193 - protein, 439 aa, unidentified
  REGION 1..439: note = Human oral metagenome
MSLTYVLDKNGQPLMPTQRCGKVYRLLKSGKAKVVQREPFTIKLLYEPETHIVQDLTLGVDTGSSKIGTAVVDNDANVYYASKVTIRNDISNKMSRRRIYRRARRTRKLRYRPVRFSNRKNSTKKDRFSPTMVSKINSHIREIEFVKSILPVKTLVIETGTFDPHLLEHIEDGIAFNKHWGYQKGSNYGFANSREACLNRDNYTCQCCGAKNTRLEVHHIIYRSKGGSDELVNLITLCEKCHKLLHDGKLKEFESKLSGKRKGILKHATQMNSIRIQLLRHYPEAIETFGFMTKENRQSSDLEKSHVNDAIIISTGCITKPKYKTEVYYKKKCIPRGDYAVTLYAGQGKKNKLGKTTKPRNTRPVYGFRKHDKVEYCNTICFLKSLRFAGNGPLMDIDGNILKFRERYGKADTTSVKNLKRISARKNCLCTKVTFLCTS

SEQ ID NO: 25194 - protein, 9 aa, synthetic construct
  PEPTIDE 2: note = X is R, K, or L
  PEPTIDE 5..6: note = X is any amino acid
  PEPTIDE 7: note = X is G or K
  PEPTIDE 8: note = X is K or R
RXLLXXXXA

SEQ ID NO: 25195 - protein, 65 aa, synthetic construct
GGGGSGGGGSGGGGSGGGGSGGGGSGGGGSGGGGSGGGGSGGGGSGGGGSGGGGSGGGGSGGGGS

SEQ ID NO: 25196 - protein, 70 aa, synthetic construct
GGGGSGGGGSGGGGSGGGGSGGGGSGGGGSGGGGSGGGGSGGGGSGGGGSGGGGSGGGGSGGGGSGGGGS

SEQ ID NO: 25197 - protein, 75 aa, synthetic construct
GGGGSGGGGSGGGGSGGGGSGGGGSGGGGSGGGGSGGGGSGGGGSGGGGSGGGGSGGGGSGGGGSGGGGSGGGGS

SEQ ID NO: 25198 - DNA, 16 bp, synthetic construct
  source 1..16: mol_type = other DNA
ggcaccgagtcggtgc

SEQ ID NO: 25199 - DNA, 30 bp, synthetic construct
  misc_feature 1..12: note = DNA
  misc_feature 13..30: note = RNA
  source 1..30: mol_type = other DNA
  misc_feature 9..12: note = NNNN on the direct repeat can be any nucleotide that base pairs with the corresponding NNNN portion of the tracer RNA
  misc_feature 13..16: note = linker sequence
gyyyyagnnnnnnnnnnnnnaanttrrrrt

SEQ ID NO: 25200 - DNA, 10 bp, synthetic construct
  source 1..10: mol_type = other DNA
ccccctcccc
